(19) United States
(12) Patent Application Publication
(10) Pub. No.: US 2016/0369293 A1
(43) Pub. Date: Dec. 22, 2016

(54) PLANTS HAVING IMPROVED CHARACTERISTICS AND METHOD FOR MAKING THE SAME

(71) Applicant: CropDesign N.V., Zwijnaarde (BE)

(72) Inventors: Ana Isabel SANZ MOLINERO, Madrid (ES); Christophe Reuzeau, La Chapelle Gonaguet (FR); Valerie Frankard, Waterloo (BE); Vladimir Mironov, Gent (BE)

(21) Appl. No.: 15/202,871

(22) Filed: Jul. 6, 2016

Related U.S. Application Data
(62) Division of application No. 12/375,433, filed on Mar. 23, 2009, now abandoned.
(60) Provisional application No. 60/868,095, filed on Dec. 1, 2006.
(60) Provisional application No. 60/859,717, filed on Nov. 17, 2006.
(60) Provisional application No. 60/851,265, filed on Oct. 12, 2006.
(60) Provisional application No. 60/851,258, filed on Oct. 12, 2006.
(60) Provisional application No. 60/851,250, filed on Oct. 12, 2006.

(30) Foreign Application Priority Data
Aug. 2, 2006 (EP) 06118347.1
Sep. 20, 2006 (EP) 06120994.6
Oct. 5, 2006 (EP) 06121856.6
Oct. 6, 2006 (EP) 06121928.3
Oct. 27, 2006 (EP) 06123066.0
Oct. 31, 2006 (EP) 06123237.7

(51) Int. Cl. C12N 15/82; C12N 9/16

(52) U.S. Cl. CPC C12N 15/8261; C12N 9/16; C12Y 301/03011

(57) ABSTRACT

The present invention relates generally to the field of molecular biology and concerns a method for enhancing various economically important characteristics in plants. More specifically, the present invention concerns a method for improving yield-related traits, such as enhanced yield and/or enhanced growth, or modified content of storage compounds in plants by modulating expression in a plant of a nucleic acid encoding a GRP (Growth Related Protein) polypeptide. The present invention also concerns plants having modulated expression of a nucleic acid encoding a GRP polypeptide, which plants have improved characterisitics relative to control plants. The invention also provides hitherto unknown GRP-encoding nucleic acids, and constructs comprising the same, useful in performing the methods of the invention.

### RELATED APPLICATIONS

[0001] This application is a divisional of U.S. application Ser. No. 12/375,433, filed Jan. 28, 2009, which is a national stage application (under 35 U.S.C. 371) of PCT/EP2007/058043 filed Aug. 2, 2007, which claims benefit of European application 06118347.1, filed Aug. 2, 2006, U.S. Provisional application 60/836,804, filed Aug. 10, 2006, European application 06120994.6, filed Sep. 20, 2006, European application 06121856.6, filed Oct. 5, 2006, European application 06121928.3, filed Oct. 6, 2006, U.S. Provisional application 60/851,265, filed Oct. 12, 2006, U.S. Provisional application 60/851,258, filed Oct. 12, 2006, U.S. Provisional application 60/851,250, filed Oct. 12, 2006, European application 06123066.0, filed Oct. 27, 2006, European application 06123237.7, filed Oct. 31, 2006, U.S. Provisional application 60/859,717, filed Nov. 17, 2006 and U.S. Provisional application 60/868,095, filed Dec. 1, 2006. The entire contents of each of these applications are hereby incorporated by reference herein in their entirety.

### SUBMISSION OF SEQUENCE LISTING

[0002] The Sequence Listing associated with this application is filed in electronic format via EFS-Web and hereby incorporated by reference into the specification in its entirety. The name of the text file containing the Sequence Listing is Sequence_Listing_074040_0102_01. The size of the text file is 845 KB, and the text file was created on Jul. 6, 2016.

[0003] The present invention relates generally to the field of molecular biology and concerns a method for improving various plant characteristics by modulating expression in a plant of a nucleic acid encoding a GRP (Growth Related Protein). The present invention also concerns plants having modulated expression of a nucleic acid encoding a GRP polypeptide, which plants have improved characteristics relative to corresponding wild type plants or other control plants. The invention also provides constructs useful in the methods of the invention.

[0004] The ever-increasing world population and the dwindling supply of arable land available for agriculture fuels research towards increasing the efficiency of agriculture. Conventional means for crop and horticultural improvements utilise selective breeding techniques to identify plants having desirable characteristics. However, such selective breeding techniques have several drawbacks, namely that these techniques are typically labour intensive and result in plants that often contain heterogeneous genetic components that may not always result in the desirable trait being passed on from parent plants. Advances in molecular biology have allowed mankind to modify the germplasm of animals and plants. Genetic engineering of plants entails the isolation and manipulation of genetic material (typically in the form of DNA or RNA) and the subsequent introduction of that genetic material into a plant. Such technology has the capacity to deliver crops or plants having various improved economic, agronomic or horticultural traits.

[0005] A trait of particular economic interest is increased yield. Yield is normally defined as the measurable produce of economic value from a crop. This may be defined in terms of quantity and/or quality. Yield is directly dependent on several factors, for example, the number and size of the organs, plant architecture (for example, the number of branches), seed production, leaf senescence and more. Root development, nutrient uptake, stress tolerance and early vigour may also be important factors in determining yield. Optimizing the abovementioned factors may therefore contribute to increasing crop yield.

[0006] Seed yield is a particularly important trait, since the seeds of many plants are important for human and animal nutrition. Crops such as corn, rice, wheat, canola and soybean account for over half the total human caloric intake, whether through direct consumption of the seeds themselves or through consumption of meat products raised on processed seeds. They are also a source of sugars, oils and many kinds of metabolites used in industrial processes. Seeds contain an embryo (the source of new shoots and roots) and an endosperm (the source of nutrients for embryo growth during germination and during early growth of seedlings). The development of a seed involves many genes, and requires the transfer of metabolites from the roots, leaves and stems into the growing seed. The endosperm, in particular, assimilates the metabolic precursors of carbohydrates, oils and proteins and synthesizes them into storage macromolecules to fill out the grain.

[0007] Another important trait for many crops is early vigour. Improving early vigour is an important objective of modern rice breeding programs in both temperate and tropical rice cultivars. Long roots are important for proper soil anchorage in water-seeded rice. Where rice is sown directly into flooded fields, and where plants must emerge rapidly through water, longer shoots are associated with vigour. Where drill-seeding is practiced, longer mesocotyls and coleoptiles are important for good seedling emergence. The ability to engineer early vigour into plants would be of great importance in agriculture. For example, poor early vigour has been a limitation to the introduction of maize (Zea mays L.) hybrids based on Corn Belt germplasm in the European Atlantic.

[0008] A further important trait is that of improved abiotic stress tolerance. Abiotic stress is a primary cause of crop loss worldwide, reducing average yields for most major crop plants by more than 50% (Wang et al., Planta (2003) 218: 1-14). Abiotic stresses may be caused by drought, salinity, extremes of temperature, chemical toxicity and oxidative stress. The ability to improve plant tolerance to abiotic stress would be of great economic advantage to farmers worldwide and would allow for the cultivation of crops during adverse conditions and in territories where cultivation of crops may not otherwise be possible.

[0009] Crop yield may therefore be increased by optimising one of the above-mentioned factors.

[0010] Depending on the end use, the modification of certain yield traits may be favoured over others. For example for applications such as forage or wood production, or bio-fuel resource, an increase in the vegetative parts of a plant may be desirable, and for applications such as flour, starch or oil production, an increase in seed parameters may be particularly desirable. Even amongst the seed parameters, some may be favoured over others, depending on the application. Various mechanisms may contribute to increasing seed yield, whether that is in the form of increased seed size or increased seed number.

[0011] One approach to increasing yield (seed yield and/or biomass) in plants may be through modification of the inherent growth mechanisms of a plant, such as the cell cycle or various signalling pathways involved in plant growth or in defense mechanisms.

[0012] It has now been found that various characteristics may be improved in plants by modulating expression in a plant of a nucleic acid encoding a GRP polypeptide in a plant. The GRP polypeptide may be one of the following: an Ankyrin-Zinc finger polypeptide (AZ), a SYT polypeptide; a chloroplastic fructose-1, 6-bisphosphatase (cpFBPase) polypeptide; a small inducible kinase (SIK); a Class II homeodomain-leucine zipper (HD Zip) transcription factor; and a SYB1 polypeptide. The improved characteristics comprise yield related traits, such as enhanced yield and/or enhanced growth, or modified content of storage compounds.

### BACKGROUND

### Ankyrin-Zinc Finger Polypeptide

[0013] Plant biomass is yield for forage crops like alfalfa, silage corn and hay. Many proxies for yield have been used in grain crops. Chief amongst these are estimates of plant size. Plant size can be measured in many ways depending on species and developmental stage, but include total plant dry weight, above-ground dry weight, above-ground fresh weight, leaf area, stem volume, plant height, rosette diameter, leaf length, root length, root mass, tiller number and leaf number. Many species maintain a conservative ratio between the size of different parts of the plant at a given developmental stage. These allometric relationships are used to extrapolate from one of these measures of size to another (e.g. Tittonell et al 2005 Agric Ecosys & Environ 105: 213). Plant size at an early developmental stage will typically correlate with plant size later in development. A larger plant with a greater leaf area can typically absorb more light and carbon dioxide than a smaller plant and therefore will likely gain a greater weight during the same period (Fasoula & Tollenaar 2005 Maydica 50:39). This is in addition to the potential continuation of the micro-environmental or genetic advantage that the plant had to achieve the larger size initially. There is a strong genetic component to plant size and growth rate (e.g. ter Steege et al 2005 Plant Physiology 139:1078), and so for a range of diverse genotypes plant size under one environmental condition is likely to correlate with size under another (Hittalmani et al 2003 Theoretical Applied Genetics 107:679). In this way a standard environment is used as a proxy for the diverse and dynamic environments encountered at different locations and times by crops in the field.

[0014] Harvest index, the ratio of seed yield to aboveground dry weight, is relatively stable under many environmental conditions and so a robust correlation between plant size and grain yield can often be obtained (e.g. Rebetzke et al 2002 Crop Science 42:739). These processes are intrinsically linked because the majority of grain biomass is dependent on current or stored photosynthetic productivity by the leaves and stem of the plant (Gardener et al 1985 Physiology of Crop Plants. Iowa State University Press, pp 68-73). Therefore, selecting for plant size, even at early stages of development, has been used as an indicator for future potential yield (e.g. Tittonell et al 2005 Agric Ecosys & Environ 105: 213). When testing for the impact of genetic differences on stress tolerance, the ability to standardize soil properties, temperature, water and nutrient availability and light intensity is an intrinsic advantage of greenhouse or plant growth chamber environments compared to the field. However, artificial limitations on yield due to poor pollination due to the absence of wind or insects, or insufficient space for mature root or canopy growth, can restrict the use of these controlled environments for testing yield differences. Therefore, measurements of plant size in early development, under standardized conditions in a growth chamber or greenhouse, are standard practices to provide indication of potential genetic yield advantages.

[0015] Transcription is performed by RNA polymerases. These polymerases are usually associated with other proteins (transcription factors) that determine the specificity of the transcription process. The transcription factors bind to cis-regulatory elements of the gene and may also mediate binding of other regulatory proteins. Stegmaier et al. proposed a classification of transcription factors based on their DNA-binding domains. 5 superclasses were discriminated, based on the presence of: 1) basic domains, 2) zinc-coordinating domains, 3) helix-turn-helix domains, 4) beta scaffold domains with minor groove contacts and 0) other domains (Stegmaier et al., Genome informatics 15, 276-286, 2004). The group of transcription factors comprising zinc-coordinating domains is quite divers and may be further classified according to their conserved cysteine and histidine residues, including the WRKY domains, C6 zinc clusters, DM and GCM domains.

[0016] Besides DNA binding motifs, transcription factors may also comprise protein-protein interaction motifs. One such motif is the ankyrin motif. It is present in very diverse families of proteins, usually as a repeat of 2 to over 20 units. Each unit contains two antiparallel helices and a beta-hairpin.

[0017] Although many plant proteins with zinc finger domains are well characterised, little is known about plant proteins comprising the C3H1 zinc finger motif. PEI1, a transcription factor that reportedly plays a role in embryo development, has a zinc finger motif that resembles the C3H1 motif but lacks an ankyrin motif (Li and Thomas, Plant Cell 10, 383-398, 1998). WO 02/44389 describes AtSIZ, a transcription factor isolated from Arabidopsis. Expression of AtSIZ under control of the CaMV35S promoter was found to promote transcription of stress-induced genes, and plants with increased expression of AtSIZ reportedly had a higher survival rate under salt stress than control plants, but no analysis was provided with respect to seed yield. It was postulated that AtSIZ could be used for increasing resistance in plants to osmotic stress.

### SYT

[0018] Abiotic stresses such as drought stress, salinity stress, heat stress and cold stress, or a combination of one or more of these, are major limiting factors of plant growth and productivity (Boyer (1982) Science 218: 443-448). These stresses have as common theme important for plant growth water availability. Since high salt content in some soils results in less available water for cell intake, its effect is similar to those observed under drought conditions. Additionally, under freezing temperatures, plant cells loose water as a result of ice formation that starts from the apoplast and withdraws water from the symplast (McKersie and Leshem (1994) Stress and stress coping in cultivated plants, Kluwer Academic Publishers). During heat stress, stomata aperture is affected to adjust cooling by evapotranspiration, thereby affecting the water content of the plant. Commonly, a plant's molecular response mechanisms to each of these stress conditions is similar.

[0019] Plants are exposed during their entire life cycle to conditions of reduced environmental water content. Most plants have evolved strategies to protect themselves against these conditions. However, if the severity and duration of the stress conditions are too great, the effects on plant development, growth and yield of most crop plant are profound. Continuous exposure to reduced environmental water availability causes major alterations in plant metabolism. These great changes in metabolism ultimately lead to cell death and consequently to yield losses. Crop losses and crop yield losses of major crops such as rice, maize (corn), and wheat caused by these stresses represent a significant economic and political factor and contribute to food shortages in many parts of the world.

[0020] Another example of abiotic environmental stress is the reduced availability of one or more nutrients that need to be assimilated by the plants for growth and development. Because of the strong influence of nutrition utilization efficiency on plant yield and product quality, a huge amount of fertilizer is poured onto fields to optimize plant growth and quality. Productivity of plants is limited by three primary nutrients: phosphorous, potassium and nitrogen, which are usually the rate-limiting elements in plant growth. The major nutritional element required for plant growth is nitrogen (N). It is a constituent of numerous important compounds found in living cells, including amino acids, proteins (enzymes), nucleic acids, and chlorophyll. 1.5% to 2% of plant dry matter is nitrogen and approximately 16% of total plant protein. Thus, nitrogen availability is a major limiting factor in crop plant growth and production (Frink et al. (1999) Proc Natl Acad Sci USA 96(4): 1175-1180), and has a major impact on protein accumulation and amino acid composition. Therefore, of great interest are crop plants with an increased yield when grown under nitrogen-limiting conditions.

[0021] Plant biomass is yield for forage crops like alfalfa, silage corn and hay. Many proxies for yield have been used in grain crops. Chief amongst these are estimates of plant size. Plant size can be measured in many ways depending on species and developmental stage, but include total plant dry weight, above-ground dry weight, above-ground fresh weight, leaf area, stem volume, plant height, rosette diameter, leaf length, root length, root mass, tiller number and leaf number. Many species maintain a conservative ratio between the size of different parts of the plant at a given developmental stage. These allometric relationships are used to extrapolate from one of these measures of size to another (e.g. Tittonell et al. (2005) Agric Ecosys & Environ 105: 213). Plant size at an early developmental stage will typically correlate with plant size later in development. A larger plant with a greater leaf area can typically absorb more light and carbon dioxide than a smaller plant and therefore will likely gain a greater weight during the same period (Fasoula & Tollenaar (2005) Maydica 50:39). This is in addition to the potential continuation of the micro-environmental or genetic advantage that the plant had to achieve the larger size initially. There is a strong genetic component to plant size and growth rate (e.g. ter Steege et al. (2005) Plant Physiology 139:1078), and so for a range of diverse genotypes plant size under one environmental condition is likely to correlate with size under another (Hittalmani et al. (2003) Theoretical Applied Genetics 107:679). In this way a standard environment is used as a proxy for the diverse and dynamic environments encountered at different locations and times by crops in the field.

[0022] Developing stress tolerant plants is a strategy that has the potential to solve or mediate at least some aspects of yield loss (McKersie and Leshem (1994) Stress and stress coping in cultivated plants, Kluwer Academic Publishers). However, traditional breeding strategies to develop new lines of plants that exhibit resistance (tolerance) to these types of stresses are relatively slow and require specific resistant lines for crossing with the desired line. Limited germplasm resources for stress tolerance and incompatibility in crosses between distantly related plant species represent significant problems encountered in conventional breeding. Furthermore, such selective breeding techniques are typically labour intensive and result in plants that often contain heterogeneous genetic components that may not always result in the desirable trait being passed on from parent plants. Advances in molecular biology have allowed mankind to modify the germplasm of animals and plants. Genetic engineering of plants entails the isolation and manipulation of genetic material (typically in the form of DNA or RNA) and the subsequent introduction of that genetic material into a plant. Such technology has the capacity to deliver crops or plants having various improved economic, agronomic or horticultural traits.

[0023] SYT is a transcriptional co-activator that, in plants, forms a functional complex with transcription activators of the GRF (growth-regulating factor) family of proteins (Kim H J, Kende H (2004) Proc Nat Acad Sc 101: 13374-9). SYT is called GIF for GRF-interacting factor in this paper, and AN3 for angustifolia3 in Horiguchi et al. (2005) Plant J 43: 68-78. The GRF transcription activators share structural domains (in the N-terminal region) with the SWI/SNF proteins of the chromatin-remodelling complexes in yeast (van der Knaap E et al., (2000) Plant Phys 122: 695-704). Transcriptional co-activators of these complexes are proposed to be involved in recruiting SWI/SNF complexes to enhancer and promoter regions to effect local chromatin remodelling (review Naar A M et al., (2001) Annu Rev Biochem 70: 475-501). The alteration in local chromatin structure modulates transcriptional activation. More precisely, SYT is proposed to interact with the plant SWI/SNF complex to affect transcriptional activation of GRF target gene(s) (Kim H J, Kende H (2004) Proc Nat Acad Sc 101: 13374-9).

[0024] SYT belongs to a gene family of three members in Arabidopsis. The SYT polypeptide shares homology with the human SYT. The human SYT polypeptide was shown to be a transcriptional co-activator (Thaete et al. (1999) Hum Molec Genet 8: 585-591). Three domains characterize the mammalian SYT polypeptide:
[0025] (i) the N-terminal SNH (SYT N-terminal homology) domain, conserved in mammals, plants, nematodes and fish;
[0026] (ii) the C-terminal QPGY-rich domain, composed predominantly of glycine, proline, glutamine and tyrosine, occurring at variable intervals;
[0027] (iii) a methionine-rich (Met-rich) domain located between the two previous domains.

[0028] In plant SYT polypeptides, the SNH domain is well conserved. The C-terminal domain is rich in glycine and glutamine, but not in proline or tyrosine. It has therefore been named the QG-rich domain in contrast to the QPGY domain of mammals. As with mammalian SYT, a Met-rich domain may be identified N-terminally of the QG domain. The QG-rich domain may be taken to be substantially the C-terminal remainder of the polypeptide (minus the SHN domain); the Met-rich domain is typically comprised within the first half of the QG-rich (from the N-terminus to the C-terminus). A second Met-rich domain may precede the SNH domain in plant SYT polypeptides (see FIG. 1).

[0029] A SYT loss-of function mutant and transgenic plants with reduced expression of SYT was reported to develop small and narrow leaves and petals, which have fewer cells (Kim H J, Kende H (2004) Proc Nat Acad Sc 101: 13374-9).

[0030] Overexpression of AN3 in Arabidopsis thaliana resulted in plants with leaves that were 20-30% larger than those of the wild type (Horiguchi et al. (2005) Plant J 43: 68-78).

[0031] In Japanese patent application 2004-350553, a method for controlling the size of leaves in the horizontal direction is described, by controlling the expression of the AN3 gene.

cpFBPase

[0032] Harvest index, the ratio of seed yield to aboveground dry weight, is relatively stable under many environmental conditions and so a robust correlation between plant size and grain yield can often be obtained (e.g. Rebetzke et al 2002 Crop Science 42:739). These processes are intrinsically linked because the majority of grain biomass is dependent on current or stored photosynthetic productivity by the leaves and stem of the plant (Gardener et al 1985 Physiology of Crop Plants. Iowa State University Press, pp 68-73). Therefore, selecting for plant size, even at early stages of development, has been used as an indicator for future potential yield (e.g. Tittonell et al 2005 Agric Ecosys & Environ 105: 213). When testing for the impact of genetic differences on stress tolerance, the ability to standardize soil properties, temperature, water and nutrient availability and light intensity is an intrinsic advantage of greenhouse or plant growth chamber environments compared to the field. However, artificial limitations on yield due to poor pollination due to the absence of wind or insects, or insufficient space for mature root or canopy growth, can restrict the use of these controlled environments for testing yield differences. Therefore, measurements of plant size in early development, under standardized conditions in a growth chamber or greenhouse, are standard practices to provide indication of potential genetic yield advantages.

[0033] Photosynthetic carbon metabolism in higher plants is an essential process for plant growth and crop yield. Carbohydrates are produced in higher plants by the fixation of atmospheric CO2 via the reductive pentose phosphate (Calvin) pathway. This process takes place in the chloroplast, and the newly synthesized triosephosphates can be kept in the stromal compartment for starch synthesis, or may be exported to the cytosol for sucrose formation. During photosynthesis, the newly synthesized carbohydrate is channeled to one or the other form depending on the needs of the plant and the environmental conditions.

[0034] The Calvin cycle is a complex pathway consisting of three phases of thirteen reactions catalyzed by eleven enzymes. One of the more important enzymes is chloroplastic fructose-1,6-bisphosphatase (cpFBPase), that catalyzes the irreversible conversion of fructose-1,6-bisphosphate to fructose-6-phosphate and Pi (inorganic P). The level of cpFBPase polypeptide in the chloroplast is very low compared to those of the other enzymes of the Calvin cycle.

[0035] The cpFBPase activity is regulated by the redox potential via the ferredoxin/thioredoxin system, which modulates the enzyme activity in response to light/dark conditions, and light-dependent changes in pH and Mg²⁺ levels (Chiadmi et al. (1999) EMBO 18(23): 6809-6815). More specifically, the cpFBPase polypeptide is active in the light, and inactive in the dark, which takes place by a thioredoxin-mediated reduction-oxidation interplay between SH groups of the enzyme molecule and also via a light-induced rise in pH and Mg2+ concentration in the chloroplast stroma (Buchanan (1980) Annu Rev Plant Physiol 31: 341-374; Jacquot (1984) Bot Acta 103: 323-334).

[0036] Higher plant and algal cpFBPase polypeptides perform the same enzymatic step, but differ somewhat in the regulation of enzymatic activity. More specifically, algal cpFBPase polypeptides present a strict requirement for reduction to be active, but are less strict on reductant specificity, i.e., they can be activated by different plastidic thioredoxins (Huppe and Buchanan (1989) Z Naturforsch 44(5-6): 487-94).

[0037] In photosynthetic (autotrophic) cells in addition to the cpFBPase polypeptide, there is a second FBPase polypeptide (isoform) located in the cytosol (cyFBPase) and involved in sucrose synthesis and gluconeogenesis. The cyFBPase polypeptide presents very different regulatory properties as compared to the cpFBPase polypeptide: it is inhibited by excess substrate, displays an allosteric inhibition by AMP and fructose-2, 6-bisphosphate, and presents a neutral pH optima. The cyFBPase polypeptide is found in heterotrophic systems (such as animal cells). An important difference between the cpFBPase polypeptides and the cyFBPase polypeptides is the presence in the former of an amino acid insertion that bears at least two conserved cysteine residues that are the targets of thioredoxin regulation.

[0038] Transgenic potato plants expressing a potato cpFBPase nucleic acid sequence under the control of a tuber-specific promoter were reported (Thorbjornsen et al. (2002) Planta 214: 616-624). The authors observed that the transgenic tubers did not differ from wild type tubers with respect to starch content, or the levels of neutral sugars and phosphorylated hexoses.

[0039] Two cyFBPase-encoding genes from cyanobacterium Synechococcus (FBPase/SBPase and FBPasell) were operably linked to a tomato rbcS transit peptide-coding sequence for chloroplastic subcellular targeting of the chimeric proteins (Miyagawa et al. (2001) Nature Biotech 19: 965-969; Tamoi et al. (2006) Plant Cell Physiol 47(3): 380-390). The activities of FBPase/SBPase and FBPasell polypeptides were not found to be regulated by redox conditions via the ferredoxin/thioredoxin system, since they lack the conserved cysteine residues. The tomato rbcS promoter was used to control the expression of both chimeric genes. Transgenic tobacco plants transformed with either chimeric construct were reported to grow significantly faster and larger than wild type plants under atmospheric conditions.

### SIK

[0040] Plant breeders are often interested in improving specific aspects of yield depending on the crop or plant in question, and the part of that plant or crop which is of economic value. For example, for certain crops, or for certain end uses, a plant breeder may look specifically for improvements in plant biomass (weight) of one or more parts of a plant, which may include aboveground (harvestable) parts and/or (harvestable) parts below ground. This is particularly relevant where the aboveground parts or below ground parts of a plant are for consumption. For many crops, particularly cereals, it is an improvement in seed yield that is highly desirable. Increased seed yield may manifest itself in many ways, with each individual aspect of seed yield being of varying importance to a plant breeder depending on the crop or plant in question and its end use. For example, seed yield may be manifested as or result from a) an increase in seed biomass (total seed weight) which may be on an individual seed basis and/or per plant and/or per square meter; b) increased number of flowers per plant; c) increased number of (filled) seeds; d) increased seed filling rate (which is typically expressed as the ratio between the number of filled seeds divided by the total number of seeds; e) increased harvest index, which is typically expressed as a ratio of the yield of harvestable parts, such as seeds, divided by the total biomass; and f) increased thousand kernel weight (TKW), which is typically extrapolated from the number of filled seeds counted and their total weight.

[0041] An increase in seed yield may also be manifested as an increase in seed size and/or seed volume. Furthermore, an increase in seed yield may also manifest itself as an increase in seed area and/or seed length and/or seed width and/or seed perimeter. Increased yield may also result in modified architecture, or may occur because of modified architecture.

[0042] Taking corn as an example, a yield increase may be manifested as one or more of the following: increase in the number of plants per square meter, an increase in the number of ears per plant, an increase in the number of rows, number of kernels per row, kernel weight, thousand kernel weight, ear length/diameter, increase in the seed filling rate (which is the number of filled seeds divided by the total number of seeds and multiplied by 100), among others. Taking rice as an example, a yield increase may manifest itself as an increase in one or more of the following: number of plants per square meter, number of panicles per plant, number of spikelets per panicle, number of flowers (florets) per panicle (which is expressed as a ratio of the number of filled seeds over the number of primary panicles), increase in the seed filling rate (which is the number of filled seeds divided by the total number of seeds and multiplied by 100), increase in thousand kernel weight, among others.

[0043] It would be of great advantage to a plant breeder to be able to be able to pick and choose the aspects of seed yield to be altered. It would be highly desirable to be able to pick off the shelf, so to speak, a gene suitable for altering a particular aspect, or component, of seed yield. For example an increase in the fill rate, combined with increased thousand kernel weight would be highly desirable for a crop such as corn. For rice and wheat a combination of increased fill rate, harvest index and increased thousand kernel weight would be highly desirable.

[0044] Published International patent Application, WO 02/074801, in the name of Genomine Inc., describes an AtSIK protein from Arabidopsis thaliana and a gene encoding said protein. It is mentioned that plants may be made resistant to osmotic stress by inhibiting expression of AtSIK, and that as a consequence the productivity of a plant may be increased. What is not mentioned however is which aspects of yield may be modified by inhibiting expression of AtSIK.

### HD Zip

[0045] The study and genetic manipulation of plants has a long history that began even before the famed studies of Gregor Mendel. In perfecting this science, scientists have accomplished modification of particular traits in plants ranging from potato tubers having increased starch content to oilseed plants such as canola and sunflower having increased or altered fatty acid content. With the increased consumption and use of plant oils, the modification of seed oil content and seed oil levels has become increasingly widespread (e.g. Töpfer et al., 1995, Science 268: 681-686). Manipulation of biosynthetic pathways in transgenic plants provides a number of opportunities for molecular biologists and plant biochemists to affect plant metabolism giving rise to the production of specific higher-value products. The seed oil production or composition has been altered in numerous traditional oilseed plants such as soybean (U.S. Pat. No. 5,955,650), canola (U.S. Pat. No. 5,955,650), sunflower (U.S. Pat. No. 6,084,164), rapeseed (Töpfer et al., 1995, Science 268:68 1-686), and non-traditional oil seed plants such as tobacco (Cahoon et al., 1992, Proc. Natl. Acad. Sci. USA 89:11184-11188).

[0046] Plant seed oils comprise both neutral and polar lipids (See Table 1). The neutral lipids contain primarily triacylglycerol, which is the main storage lipid that accumulates in oil bodies in seeds. The polar lipids are mainly found in the various membranes of the seed cells, e.g. the microsomal, plastidial, and mitochondrial membranes, and the cell membrane. The neutral and polar lipids contain several common fatty acids (See Table 2) and a range of less common fatty acids. The fatty acid composition of membrane lipids is highly regulated and only a select number of fatty acids are found in membrane lipids. On the other hand, a large number of unusual fatty acids can be incorporated into the neutral storage lipids in seeds of many plant species (Van de Loo F. J. et al., 1993, Unusual Fatty Acids in Lipid Metabolism in Plants pp. 91-126, editor T S Moore Jr. CRC Press; Millar et al., 2000, Trends Plant Sci. 5:95-101).

TABLE 1
plant lipid classes

| | |
|---|---|
| Neutral lipids | Triacylglycerol (TAG) |
| | Diacylglycerol (DAG) |
| | Monoacylglycerol (MAG) |
| Polar lipids | Monogalactosyldiacylglycerol (MGDG) |
| | Digalactosyldiacylglycerol (DGDG) |
| | Phosphatidylglycerol (PG) |
| | Phosphatidylcholine (PC) |
| | Phosphatidylethanolamine (PE) |
| | Phosphatidylinositol (PI) |
| | Phosphatidylserine (PS) |
| | Sulfoquinovosyldiacylglycerol |

TABLE 2
common plant fatty acids

| | |
|---|---|
| 16:0 | palmitic acid |
| 16:1 | palmitoleic acid |
| 16:3 | hiragonic acid |
| 18:0 | stearic acid |
| 18:1 | oleic acid |
| 18:2 | linoleic acid |
| 18:3 | linolenic acid |
| γ-18:3 | gamma-linoleic acid* |
| 20:0 | arachidic acid |
| 20:1 | eicosenoic acid |
| 22:6 | docosahexanoic acid (DHA)* |
| 20:2 | eicosadienoic acid |
| 20:4 | arachidonic acid (AA)* |
| 20:5 | eicosapentaenoic acid (EPA)* |
| 22:1 | erucic acid |

[0047] In Table 2, the fatty acids denoted with an asterisk do not normally occur in plant seed oils, but their production in transgenic plant seed oil is of importance in plant biotechnology.

[0048] The primary sites of fatty acid biosynthesis in plants are the plastids. Fatty acid biosynthesis begins with the conversion of acetyl-CoA to malonyl-CoA by acetyl-CoA carboxylase (ACCase). The malonyl moiety is then transferred to an acyl carrier protein (ACP) by the malonyl-CoA:ACP transacylase. The enzyme beta-ketoacyl-ACP-synthase III (KAS III) catalyzes the initial condensation reaction of fatty acid biosynthesis, in which after decarboxylation of malonyl-ACP, the resulting carbanion is transferred to acetyl-CoA by a nucleophilic attack of the carbonyl-carbon, resulting in the formation of 3-ketobutyryl-ACP. The reaction cycle is completed by a reduction, a dehydration and again a reduction yielding butyric acid. This reaction cycle is repeated (with KAS I or KAS II catalyzing the condensation reaction) until the acyl-group reach a chain length of usually 16 to 18 carbon atoms. These acyl-ACPs can be desaturated by the stearoyl-ACP desaturase, used as substrates for plastidial acyltransferases in the formation of lipids through what has been referred to as the prokaryotic pathway, or exported to the cytosol after cleavage from ACP through the action of thioesterases. In the cytosol they enter the acyl-CoA pool and can be used for the synthesis of lipids through what has been referred to as the eukaryotic pathway in the endoplasmic reticulum.

[0049] Lipid synthesis through both the prokaryotic and eukaryotic pathways occurs through the successive acylation of glycerol-3-phosphate, catalyzed by glycerol-3-phosphate acyltransferases (GPAT) and lysophosphatidic acid acyltransferase (LPAAT) (Browse et al., 1986, Biochemical J. 235:25-31; Ohlrogge & Browse, 1995, 5 Plant Ce 11 7:957-970). The resulting phosphatidic acid (PA) is the precursor for other polar membrane lipids such as monogalactosyldiacylglycerol (MGD), digalactosyldiacylglycerol (DGD), phosphatidylglycerol (PG) and sulfoquinovosyldiacylglycerol (SQD) in the plastid and phosphatidylcholine (PC), phosphatidylethanolamine (PE), phosphatidylinositol (PI) and phosphatidylserine (PS) in the endoplasmic reticulum. The polar lipids are also the sites of further modification of the acyl-chain such as desaturation, acetylenation, and hydroxylation. In the endoplasmic reticulum, PA is also the intermediate in the biosynthesis of triacylglycerol (TAG), the major component of neutral lipids and hence of seed oil. Furthermore, alternative pathways for the biosynthesis of TAGS can exist (i.e. transacylation through the action of phosphatidylcholine:diacylglycerol acyltransferase) (Voelker, 1996, Genetic Engineering ed.: Setlow 1 8: 111-113; Shanklin & Cahoon, 1998, Annu. Rev. Plant Physiol. Plant Mol. Biol. 49:611-641; Frentzen, 1998, Lipids 100:161-166; Millar et al., 2000, Trends Plant Sci. 5:95-101). The reverse reaction, the breakdown of triacylglycerol to diacylglycerol and fatty acids is catalyzed by lipases. Such a breakdown can be seen towards the end of seed development resulting in a certain reduction in seed oil. (Buchanan et al., 2000).

[0050] Storage lipids in seeds are synthesized from carbohydrate-derived precursors. Plants have a complete glycolytic pathway in the cytosol (Plaxton, 1996, Annu. Rev. Plant Physiol. Plant Mol. Biol. 47: 185-214), and it has been shown that a complete pathway also exists in the plastids of rapeseed (Kang & Rawsthorne, 1994, Plant J. 6:795-805). Sucrose is the primary source of carbon and energy, transported from the leaves into the developing seeds. During the storage phase of seeds, sucrose is converted in the cytosol to provide the metabolic precursors glucose-6-phosphate and pyruvate. These are transported into the plastids and converted into acetyl-CoA that serves as the primary precursor for the synthesis of fatty acids. Acetyl-CoA in the plastids is the central precursor for lipid biosynthesis. Acetyl-CoA can be formed in the plastids by different reactions, and the exact contribution of each reaction is still being debated (Ohlrogge & Browse, 1995, Plant Ce 11 7:957-970). It is accepted, however, that a large part of the acetyl-CoA is derived from glucose-6-phosphate and pyruvate that are imported from the cytoplasm into the plastids. Sucrose is produced in the source organs (leaves, or anywhere that photosynthesis occurs) and is transported to the developing seeds, also termed sink organs. In the developing seeds, sucrose is the precursor for all the storage compounds, i.e. starch, lipids, and partly the seed storage proteins. Therefore, it is clear that carbohydrate metabolism in which sucrose plays a central role is very important to the accumulation of seed storage compounds.

[0051] Although lipid and fatty acid content of seed oil can be modified by the traditional methods of plant breeding, the advent of recombinant DNA technology has allowed for easier manipulation of the seed oil content of a plant, and in some cases, has allowed for the alteration of seed oils in ways that could not be accomplished by breeding alone (See, e.g., Töpfer et al., 1995, Science 268:681-686). For example, introduction of a Δ¹²-hydroxylase nucleic acid sequence into transgenic tobacco resulted in the formation of a novel fatty acid, ricinoleic acid, into the tobacco seed oil (Van de Loo et al., 1995, Proc. Natl. Acad. Sci USA 92:6743-6747). Tobacco plants have also been engineered to produce low levels of petroselinic acid by the introduction and expression of an acyl-ACP desaturase from coriander (Cahoon et al., 1992, Proc. Natl. Acad. Sci USA 89: 11 184-1 1 188).

[0052] The modification of seed oil content in plants has significant medical, nutritional, and economic ramifications. With regard to the medical ramifications, the long chain fatty acids (C18 and longer) found in many seed oils have been linked to reductions in hypercholesterolemia and other clinical disorders related to coronary heart disease (Brenner, 1976, Adv. Exp. Med. Biol. 83:85-101). Therefore, consumption of a plant having increased levels of these types of fatty acids may reduce the risk of heart disease. Enhanced levels of seed oil content are also useful in increasing the large-scale production of seed oils and thereby reducing the cost of these oils.

[0053] As mentioned earlier, several desaturase nucleic acids such as the Δ⁶-desaturase nucleic acid, Δ¹²-desaturase nucleic acid and acyl-ACP desaturase nucleic acid have been cloned and demonstrated to encode enzymes required for fatty acid synthesis in various plant species. Oleosin nucleic acid sequences from species such as Brassica, soybean, carrot, pine, and Arabidopsis thaliana have also been cloned and determined to encode proteins associated with the phospholipid monolayer membrane of oil bodies in those plants.

[0054] It has now been found that nucleic acid sequences encoding Class II homeodomain-leucine zipper (HD-Zip) transcription factors are useful in modifying the content of storage compounds in seeds.

[0055] Transcription factors are usually defined as proteins that show sequence-specific DNA binding and that are capable of activating and/or repressing transcription. The Arabidopsis genome codes for at least 1533 transcriptional regulators, which account for ˜5.9% of its estimated total number of genes. About 45% of these transcription factors are reported to be from families specific to plants (Riechmann et al., 2000 (Science Vol. 290, 2105-2109)). One example of such a plant-specific family of transcription factors is the family of HD-Zip transcription factors.

[0056] Homeobox genes are transcription factors present in all eukaryotes and constitute a gene family of at least 89 members in Arabidopsis thaliana. They are characterized by the presence of a homeodomain, which usually consists of 60 conserved amino acid residues that form a helix-loop-helix-turn-helix structure that binds DNA. This DNA binding site is usually pseudopalindromic. Homeobox genes play crucial and diverse roles in many aspects of development, including the early development of animal embryos, the specification of cell types in yeast, and the initiation and maintenance of the shoot apical meristem in flowering plants (Sakakibara et al. Mol. Biol. Evol. 18(4): 491-502, 2001).

[0057] Numerous angiosperm homeobox genes have been isolated and sorted into seven distinct groups based on their amino acid similarities. These include the KNOX, BELL, HD-PHD-finger, HAT1, HAT 2, GL2, and ATHB8 groups. Genes in the latter four groups also encode a leucine zipper motif adjacent to the C-terminus of the homeodomain and collectively form the homeodomain-leucine zipper (HD-Zip) gene family. Aso et al., Mol. Biol. Evol. 16(4):544-552, 1999. Of the at least 89 members comprising the homeobox gene family in Arabidopsis thaliana, at least 47 comprise both a homeodomain and a leucine zipper. Although the combination of a homeodomain and a leucine zipper motif is unique to plants, it has also been encountered in moss in addition to vascular plants (Sakakibara et al. (2001) Mol Biol Evol 18(4): 491-502).

[0058] Homeodomain leucine zipper (HD-Zip) proteins constitute a family of transcription factors characterized by the presence of a DNA-binding domain (HD) and an adjacent leucine zipper (Zip) motif. The leucine zipper, adjacent to the C-terminal end of the homeodomain, consists of several heptad repeats (at least four) in which a leucine (occasionally a valine or an isoleucine) typically appears every seventh amino acid. The leucine zipper is important for protein dimerisation. This dimerisation is a prerequisite for DNA binding (Sessa et al. (1993) EMBO J 12(9): 3507-3517), and may proceed between two identical HD-Zip proteins (homodimer) or between two different HD-Zip proteins (heterodimer).

[0059] The group of angiosperm homeobox genes HAT1, HAT2, GL2, and ATHB8 groups have been renamed the HD-Zip I-IV subfamilies. The combination of a homeodomain and a leucine zipper motif is unique to higher plants, suggesting that the HD-Zip genes may be involved in the regulation of developmental processes specific to plants. Aso et al., Mol. Biol. Evol. 16(4):544-552, 1999. The functions of the HD-Zip genes are diverse among the different subfamilies. HD-Zip I and II genes are likely involved in signal transduction networks of light, dehydration-induced ABA, or auxin. These signal transduction networks are related to the general growth regulation of plants. The overexpression of sense or antisense HD-Zip I or II mRNA usually alters growth rate and development. Most members of the HD-Zip III subfamily play roles in cell differentiation in the stele. HD-Zip IV genes are related to the differentiation of the outermost cell layer. Sakakibara et al. Mol. Biol. Evol. 18(4): 491-502, 2001.

[0060] Different HD-Zip proteins have been shown to either activate or repress transcription. In Arabidopsis, the class I HD-Zip ATHB1, -5, -6, and -16 were shown to act as transcriptional activators in transient expression assays on Arabidopsis leaves using a reporter gene, luciferase (Henriksson et al. (2005) Plant Phys 139: 509-518). Two rice class I HDZip proteins, Oshox4 and Oshox5, acted as activators in transient expression assays on rice cell suspension cultures using another reporter gene (glucuronidase; Meijer et al. (2000) Mol Gen Genet 263:12-21). In contrast, two rice class II HD-Zip proteins, Oshox1 and Oshox3, acted as transcriptional repressors in the same experiments (Meijer et al. (1997) Plant J 11: 263-276; Meijer et al. (2000) supra).

[0061] The Class II HD-Zip gene from Arabidopsis thaliana, HAT4, also known as ATHB-2, has been reported to act as a regulator of shade-avoidance responses (Morelli and Ruberti TIPS Vol. 7 No. 9, September 2002).

### SYB1

[0062] Ran is a small signalling GTPase (GTP binding protein) in animal cells, which is involved in nucleocytoplasmic transport. Nucleocytoplasmic transport has been studied mainly in animal systems. Several Ran binding proteins are known, among them RanBP2, also known as Nup358. RanBP2 is postulated to associate on the cytoplasmic side with proteins of the Nuclear Pore Complex and putatively functions as a SUMO E3 ligase, although its structure is not of a typical E3 ligase. SUMOs (small ubiquitin-related modifiers) are eukaryotic proteins that are covalently ligated to other proteins, thereby regulating a number of cellular processes. In association with Ubc9 (which acts an E2 conjugating protein), RanBP2 labels substrates linked to nuclear import receptors with SUMO-1, in a similar way as ubiquitination of proteins. The SUMOylated substrate is then imported through the nuclear pore into the nucleus. Examples of imported proteins upon SUMOylation include NFX1-p15, a chaperone in mRNA export and the histone deacetylase HDAC-4. SUMO modification and hence RanBP2, is also implicated to play a role in gene expression, in cell cycle (during nuclear envelope breakdown), and in the formation of subcellular structures such as promyelocytic leukemia bodies.

[0063] Most of the studies were performed in model animal systems and little is known about the corresponding proteins and processes in plants. Proteins related to RanBP2, identified in Arabidopsis, share the zinc finger domains but are otherwise different in structure.

### SUMMARY

[0064] Surprisingly, it has now been found that modulating expression of a nucleic acid encoding a GRP polypeptide gives plants having improved characteristics relative to control plants.

[0065] In one aspect of the present invention, it has now been found that modulating expression in a plant of a nucleic acid encoding the AZ polypeptide from Arabidopsis (AtAZ) or a homologue thereof gives plants having increased yield relative to control plants. According to one embodiment of the present invention, there is provided a method for increasing plant yield, comprising modulating expression in a plant of a nucleic acid encoding the AZ polypeptide or a homologue thereof. Advantageously, performance of the methods according to the present invention results in plants having increased yield, particularly seed yield, relative to corresponding wild type plants. The present invention also provides nucleic acid sequences and constructs useful in performing such methods.

[0066] In another aspect of the present invention, it has now been found that modulating expression in a plant of a nucleic acid sequence encoding a SYT polypeptide gives plants having increased yield under abiotic stress relative to control plants. Therefore, the invention also provides a method for increasing plant yield under abiotic stress relative to control plants, comprising modulating expression in a plant of a nucleic acid sequence encoding a SYT polypeptide. The present invention also provides nucleic acid sequences and constructs useful in performing such methods.

[0067] In still another aspect of the present invention, it has now been found that increasing expression in aboveground parts of a plant of a nucleic acid sequence encoding a chloroplastic fructose-1,6-bisphosphatase (cpFBPase) polypeptide increases plant yield relative to control plants. Therefore, according to the present invention, there is provided a method for increasing plant yield relative to control plants, comprising increasing expression in aboveground parts of a plant of a nucleic acid sequence encoding a cpFBPase polypeptide. The present invention also provides nucleic acid sequences and constructs useful in performing such methods.

[0068] In yet another aspect of the present invention, it has now been found that modulating expression in a plant of a SIK nucleic acid and/or a SIK polypeptide gives plants having various improved yield-related traits relative to control plants, wherein overexpression of a SIK-encoding nucleic acid in a plant gives increased number of flowers per plant relative to control plants, and wherein the reduction or substantial elimination of a SIK nucleic acid gives increased thousand kernel weight, increased harvest index and increased fill rate relative to corresponding wild type plants. The present invention also provides nucleic acid sequences and constructs useful in performing such methods.

[0069] In a further aspect of the present invention, it has now been found that nucleic acids encoding Class II HD-Zip transcription factors are useful in modifying the content of storage compounds in seeds. The present invention therefore provides a method for modifying the content of storage compounds in seeds relative to control plants by modulating expression in a plant of a nucleic acid encoding a Class II HD-Zip transcription factor. The present invention also provides nucleic acid sequences and constructs useful in performing such methods. The invention further provides seeds having a modified content of storage compounds relative to control plants, which seeds have modulated expression of a nucleic acid encoding a Class II HD-Zip transcription factor. The present invention provides a method for modifying the content of storage compounds in seeds relative to control plants, comprising modulating expression in a plant of a nucleic acid encoding a Class II HD-Zip transcription factor.

[0070] In another aspect of the present invention, it has now been found that modulating expression in a plant of a nucleic acid encoding a SYB1 polypeptide gives plants having enhanced yield-related traits relative to control plants. This yield increase was surprisingly observed when the plants were cultivated under conditions without stress (non-stress conditions). The present invention therefore also provides a method for enhancing yield-related traits in plants relative to control plants, comprising modulating expression in a plant of a nucleic acid encoding a SYB1 polypeptide. The present invention also provides nucleic acid sequences and constructs useful in performing such methods.

### DEFINITIONS

### Polypeptide(s)/Protein(s)

[0071] The terms “polypeptide” and “protein” are used interchangeably herein and refer to amino acids in a polymeric form of any length, linked together by peptide bonds.

### Polynucleotide(s)/Nucleic Acid(s)/Nucleic Acid Sequence(s)/Nucleotide Sequence(s)

[0072] The terms “polynucleotide(s)”, “nucleic acid sequence(s)”, “nucleotide sequence(s)”, “nucleic acid(s)”, “nucleic acid molecule” are used interchangeably herein and refer to nucleotides, either ribonucleotides or deoxyribonucleotides or a combination of both, in a polymeric unbranched form of any length.

### Control Plant(s)

[0073] The choice of suitable control plants is a routine part of an experimental setup and may include corresponding wild type plants or corresponding plants without the gene of interest. The control plant is typically of the same plant species or even of the same variety as the plant to be assessed. The control plant may also be a nullizygote of the plant to be assessed. Nullizygotes are individuals missing the transgene by segregation. A “control plant” as used herein refers not only to whole plants, but also to plant parts, including seeds and seed parts.

### Homologue(s)

[0074] “Homologues” of a protein encompass peptides, oligopeptides, polypeptides, proteins and enzymes having amino acid substitutions, deletions and/or insertions relative to the unmodified protein in question and having similar biological and functional activity as the unmodified protein from which they are derived.

[0075] A deletion refers to removal of one or more amino acids from a protein.

[0076] An insertion refers to one or more amino acid residues being introduced into a predetermined site in a protein. Insertions may comprise N-terminal and/or C-terminal fusions as well as intra-sequence insertions of single or multiple amino acids. Generally, insertions within the amino acid sequence will be smaller than N- or C-terminal fusions, of the order of about 1 to 10 residues. Examples of N- or C-terminal fusion proteins or peptides include the binding domain or activation domain of a transcriptional activator as used in the yeast two-hybrid system, phage coat proteins, (histidine)-6-tag, glutathione S-transferase-tag, protein A, maltose-binding protein, dihydrofolate reductase, Tag•100 epitope, c-myc epitope, FLAG®-epitope, lacZ, CMP (calmodulin-binding peptide), HA epitope, protein C epitope and VSV epitope.

[0077] A substitution refers to replacement of amino acids of the protein with other amino acids having similar properties (such as similar hydrophobicity, hydrophilicity, antigenicity, propensity to form or break α-helical structures or β-sheet structures). Amino acid substitutions are typically of single residues, but may be clustered depending upon functional constraints placed upon the polypeptide; insertions will usually be of the order of about 1 to 10 amino acid residues. The amino acid substitutions are preferably conservative amino acid substitutions. Conservative substitution tables are well known in the art (see for example Creighton (1984) Proteins. W.H. Freeman and Company (Eds) and Table 3 below).

TABLE 3
Examples of conserved amino acid substitutions

| | Conservative |
|---|---|
| Residue | Substitutions |
| Ala | Ser |
| Arg | Lys |
| Asn | Gln; His |
| Asp | Glu |
| Gln | Asn |
| Cys | Ser |
| Glu | Asp |
| Gly | Pro |
| His | Asn; Gln |
| Ile | Leu, Val |
| Leu | Ile; Val |
| Lys | Arg; Gln |
| Met | Leu; Ile |
| Phe | Met; Leu; Tyr |
| Ser | Thr; Gly |
| Thr | Ser; Val |
| Trp | Tyr |
| Tyr | Trp; Phe |
| Val | Ile; Leu |

[0078] Amino acid substitutions, deletions and/or insertions may readily be made using peptide synthetic techniques well known in the art, such as solid phase peptide synthesis and the like, or by recombinant DNA manipulation. Methods for the manipulation of DNA sequences to produce substitution, insertion or deletion variants of a protein are well known in the art. For example, techniques for making substitution mutations at predetermined sites in DNA are well known to those skilled in the art and include M13 mutagenesis, T7-Gen in vitro mutagenesis (USB, Cleveland, Ohio), QuickChange Site Directed mutagenesis (Stratagene, San Diego, Calif.), PCR-mediated site-directed mutagenesis or other site-directed mutagenesis protocols.

### Derivatives

[0079] “Derivatives” include peptides, oligopeptides, polypeptides which may, compared to the amino acid sequence of the naturally-occurring form of the protein, such as the protein of interest, comprise substitutions of amino acids with non-naturally occurring amino acid residues, or additions of non-naturally occurring amino acid residues. “Derivatives” of a protein also encompass peptides, oligopeptides, polypeptides which comprise naturally occurring altered (glycosylated, acylated, prenylated, phosphorylated, myristoylated, sulphated etc.) or non-naturally altered amino acid residues compared to the amino acid sequence of a naturally-occurring form of the polypeptide. A derivative may also comprise one or more non-amino acid substituents or additions compared to the amino acid sequence from which it is derived, for example a reporter molecule or other ligand, covalently or non-covalently bound to the amino acid sequence, such as a reporter molecule which is bound to facilitate its detection, and non-naturally occurring amino acid residues relative to the amino acid sequence of a naturally-occurring protein. Furthermore, “derivatives” also include fusions of the naturally-occurring form of the protein with tagging peptides such as FLAG, HIS6 or thioredoxin (for a review of tagging peptides, see Terpe, Appl. Microbiol. Biotechnol. 60, 523-533, 2003).

Orthologue(s)/Paralogue(s) Orthologues and paralogues encompass evolutionary concepts used to describe the ancestral relationships of genes. Paralogues are genes within the same species that have originated through duplication of an ancestral gene; orthologues are genes from different organisms that have originated through speciation, and are also derived from a common ancestral gene.

### Domain

[0080] The term “domain” refers to a set of amino acids conserved at specific positions along an alignment of sequences of evolutionarily related proteins. While amino acids at other positions can vary between homologues, amino acids that are highly conserved at specific positions indicate amino acids that are likely essential in the structure, stability or function of a protein. Identified by their high degree of conservation in aligned sequences of a family of protein homologues, they can be used as identifiers to determine if any polypeptide in question belongs to a previously identified polypeptide family.

### Motif/Consensus Sequence/Signature

[0081] The term “motif” or “consensus sequence” or “signature” refers to a short conserved region in the sequence of evolutionarily related proteins. Motifs are frequently highly conserved parts of domains, but may also include only part of the domain, or be located outside of conserved domain (if all of the amino acids of the motif fall outside of a defined domain).

### Hybridisation

[0082] The term “hybridisation” as defined herein is a process wherein substantially homologous complementary nucleotide sequences anneal to each other. The hybridisation process can occur entirely in solution, i.e. both complementary nucleic acids are in solution. The hybridisation process can also occur with one of the complementary nucleic acids immobilised to a matrix such as magnetic beads, Sepharose beads or any other resin. The hybridisation process can furthermore occur with one of the complementary nucleic acids immobilised to a solid support such as a nitro-cellulose or nylon membrane or immobilised by e.g. photolithography to, for example, a siliceous glass support (the latter known as nucleic acid arrays or microarrays or as nucleic acid chips). In order to allow hybridisation to occur, the nucleic acid molecules are generally thermally or chemically denatured to melt a double strand into two single strands and/or to remove hairpins or other secondary structures from single stranded nucleic acids.

[0083] The term “stringency” refers to the conditions under which a hybridisation takes place. The stringency of hybridisation is influenced by conditions such as temperature, salt concentration, ionic strength and hybridisation buffer composition. Generally, low stringency conditions are selected to be about 30° C. lower than the thermal melting point (Tₘ) for the specific sequence at a defined ionic strength and pH. Medium stringency conditions are when the temperature is 20° C. below Tₘ, and high stringency conditions are when the temperature is 10° C. below Tₘ. High stringency hybridisation conditions are typically used for isolating hybridising sequences that have high sequence similarity to the target nucleic acid sequence. However, nucleic acids may deviate in sequence and still encode a substantially identical polypeptide, due to the degeneracy of the genetic code. Therefore medium stringency hybridisation conditions may sometimes be needed to identify such nucleic acid molecules.

[0084] The Tm is the temperature under defined ionic strength and pH, at which 50% of the target sequence hybridises to a perfectly matched probe. The Tₘ is dependent upon the solution conditions and the base composition and length of the probe. For example, longer sequences hybridise specifically at higher temperatures. The maximum rate of hybridisation is obtained from about 16° C. up to 32° C. below Tₘ. The presence of monovalent cations in the hybridisation solution reduce the electrostatic repulsion between the two nucleic acid strands thereby promoting hybrid formation; this effect is visible for sodium concentrations of up to 0.4M (for higher concentrations, this effect may be ignored). Formamide reduces the melting temperature of DNA-DNA and DNA-RNA duplexes with 0.6 to 0.7° C. for each percent formamide, and addition of 50% formamide allows hybridisation to be performed at 30 to 45° C., though the rate of hybridisation will be lowered. Base pair mismatches reduce the hybridisation rate and the thermal stability of the duplexes. On average and for large probes, the Tm decreases about 1° C. per % base mismatch. The Tm may be calculated using the following equations, depending on the types of hybrids:

1) DNA-DNA hybrids (Meinkoth and Wahl, Anal. Biochem., 138: 267-284, 1984):

Tₘ=81.5° C.+16.6x log₁₀ [Na⁺]^{a}+0.41x %[G/C^{b}]−500x[L^{c}]⁻¹−0.61x % formamide

2) DNA-RNA or RNA-RNA hybrids:

Tm=79.8+18.5(log₁₀ [Na⁺]^{a})+0.58(% G/C^{b})+11.8(% G/C^{b})²−820/L^{c}

3) oligo-DNA or oligo-RNA^{d} hybrids:
[0085] For <20 nucleotides: Tₘ=2 (lₙ)
[0086] For 20-35 nucleotides: Tₘ=22+1.46 (lₙ)
[0087] ^{a} or for other monovalent cation, but only accurate in the 0.01-0.4 M range.
[0088] ^{b} only accurate for % GC in the 30% to 75% range.
[0089] ^{c} L=length of duplex in base pairs.
[0090] ^{d} oligo, oligonucleotide; l_{n′}=effective length of primer=2×(no. of G/C)+(no. of A/T).

[0091] Non-specific binding may be controlled using any one of a number of known techniques such as, for example, blocking the membrane with protein containing solutions, additions of heterologous RNA, DNA, and SDS to the hybridisation buffer, and treatment with Rnase. For non-homologous probes, a series of hybridizations may be performed by varying one of (i) progressively lowering the annealing temperature (for example from 68° C. to 42° C.) or (ii) progressively lowering the formamide concentration (for example from 50% to 0%). The skilled artisan is aware of various parameters which may be altered during hybridisation and which will either maintain or change the stringency conditions.

[0092] Besides the hybridisation conditions, specificity of hybridisation typically also depends on the function of post-hybridisation washes. To remove background resulting from non-specific hybridisation, samples are washed with dilute salt solutions. Critical factors of such washes include the ionic strength and temperature of the final wash solution: the lower the salt concentration and the higher the wash temperature, the higher the stringency of the wash. Wash conditions are typically performed at or below hybridisation stringency. A positive hybridisation gives a signal that is at least twice of that of the background. Generally, suitable stringent conditions for nucleic acid hybridisation assays or gene amplification detection procedures are as set forth above. More or less stringent conditions may also be selected. The skilled artisan is aware of various parameters which may be altered during washing and which will either maintain or change the stringency conditions.

[0093] For example, typical high stringency hybridisation conditions for DNA hybrids longer than 50 nucleotides encompass hybridisation at 65° C. in 1×SSC or at 42° C. in 1×SSC and 50% formamide, followed by washing at 65° C. in 0.3×SSC. Examples of medium stringency hybridisation conditions for DNA hybrids longer than 50 nucleotides encompass hybridisation at 50° C. in 4×SSC or at 40° C. in 6×SSC and 50% formamide, followed by washing at 50° C. in 2×SSC. The length of the hybrid is the anticipated length for the hybridising nucleic acid. When nucleic acids of known sequence are hybridised, the hybrid length may be determined by aligning the sequences and identifying the conserved regions described herein. 1×SSC is 0.15M NaCl and 15 mM sodium citrate; the hybridisation solution and wash solutions may additionally include 5×Denhardt's reagent, 0.5-1.0% SDS, 100 μg/ml denatured, fragmented salmon sperm DNA, 0.5% sodium pyrophosphate.

[0094] For the purposes of defining the level of stringency, reference can be made to Sambrook et al. (2001) Molecular Cloning: a laboratory manual, 3^{rd} Edition, Cold Spring Harbor Laboratory Press, CSH, New York or to Current Protocols in Molecular Biology, John Wiley & Sons, N.Y. (1989 and yearly updates).

### Splice Variant

[0095] The term “splice variant” as used herein encompasses variants of a nucleic acid sequence in which selected introns and/or exons have been excised, replaced, displaced or added, or in which introns have been shortened or lengthened. Such variants will be ones in which the biological activity of the protein is substantially retained; this may be achieved by selectively retaining functional segments of the protein. Such splice variants may be found in nature or may be manmade. Methods for predicting and isolating such splice variants are well known in the art (see for example Foissac and Schiex (2005) BMC Bioinformatics 6: 25).

### Allelic Variant

[0096] Alleles or allelic variants are alternative forms of a given gene, located at the same chromosomal position. Allelic variants encompass Single Nucleotide Polymorphisms (SNPs), as well as Small Insertion/Deletion Polymorphisms (INDELs). The size of INDELs is usually less than 100 bp. SNPs and INDELs form the largest set of sequence variants in naturally occurring polymorphic strains of most organisms.

### Gene Shuffling/Directed Evolution

[0097] Gene shuffling or directed evolution consists of iterations of DNA shuffling followed by appropriate screening and/or selection to generate variants of nucleic acids or portions thereof encoding proteins having a modified biological activity (Castle et al., (2004) Science 304(5674): 1151-4; U.S. Pat. Nos. 5,811,238 and 6,395,547).

### Regulatory Element/Control Sequence/Promoter

[0098] The terms “regulatory element”, “control sequence” and “promoter” are all used interchangeably herein and are to be taken in a broad context to refer to regulatory nucleic acid sequences capable of effecting expression of the sequences to which they are ligated. The term “promoter” typically refers to a nucleic acid control sequence located upstream from the transcriptional start of a gene and which is involved in recognising and binding of RNA polymerase and other proteins, thereby directing transcription of an operably linked nucleic acid. Encompassed by the aforementioned terms are transcriptional regulatory sequences derived from a classical eukaryotic genomic gene (including the TATA box which is required for accurate transcription initiation, with or without a CCAAT box sequence) and additional regulatory elements (i.e. upstream activating sequences, enhancers and silencers) which alter gene expression in response to developmental and/or external stimuli, or in a tissue-specific manner. Also included within the term is a transcriptional regulatory sequence of a classical prokaryotic gene, in which case it may include a −35 box sequence and/or −10 box transcriptional regulatory sequences. The term “regulatory element” also encompasses a synthetic fusion molecule or derivative that confers, activates or enhances expression of a nucleic acid molecule in a cell, tissue or organ.

[0099] A “plant promoter” comprises regulatory elements, which mediate the expression of a coding sequence segment in plant cells. Accordingly, a plant promoter need not be of plant origin, but may originate from viruses or micro-organisms, for example from viruses which attack plant cells. The “plant promoter” can also originate from a plant cell, e.g. from the plant which is transformed with the nucleic acid sequence to be expressed in the inventive process and described herein. This also applies to other “plant” regulatory signals, such as “plant” terminators. The promoters upstream of the nucleotide sequences useful in the methods of the present invention can be modified by one or more nucleotide substitution(s), insertion(s) and/or deletion(s) without interfering with the functionality or activity of either the promoters, the open reading frame (ORF) or the 3′-regulatory region such as terminators or other 3′ regulatory regions which are located away from the ORF. It is furthermore possible that the activity of the promoters is increased by modification of their sequence, or that they are replaced completely by more active promoters, even promoters from heterologous organisms. For expression in plants, the nucleic acid molecule must, as described above, be linked operably to or comprise a suitable promoter which expresses the gene at the right point in time and with the required spatial expression pattern.

[0100] For the identification of functionally equivalent promoters, the promoter strength and/or expression pattern of a candidate promoter may be analysed for example by operably linking the promoter to a reporter gene and assaying the expression level and pattern of the reporter gene in various tissues of the plant. Suitable well-known reporter genes include for example beta-glucuronidase or beta-galactosidase. The promoter activity is assayed by measuring the enzymatic activity of the beta-glucuronidase or beta-galactosidase. The promoter strength and/or expression pattern may then be compared to that of a reference promoter (such as the one used in the methods of the present invention). Alternatively, promoter strength may be assayed by quantifying mRNA levels or by comparing mRNA levels of the nucleic acid used in the methods of the present invention, with mRNA levels of housekeeping genes such as 18S rRNA, using methods known in the art, such as Northern blotting with densitometric analysis of autoradiograms, quantitative real-time PCR or RT-PCR (Heid et al., 1996 Genome Methods 6: 986-994). Generally by “weak promoter” is intended a promoter that drives expression of a coding sequence at a low level. By “low level” is intended at levels of about 1/10,000 transcripts to about 1/100,000 transcripts, to about 1/500,0000 transcripts per cell. Conversely, a “strong promoter” drives expression of a coding sequence at high level, or at about 1/10 transcripts to about 1/100 transcripts to about 1/1000 transcripts per cell.

### Operably Linked

[0101] The term “operably linked” as used herein refers to a functional linkage between the promoter sequence and the gene of interest, such that the promoter sequence is able to initiate transcription of the gene of interest.

### Constitutive Promoter

[0102] A “constitutive promoter” refers to a promoter that is transcriptionally active during most, but not necessarily all, phases of growth and development and under most environmental conditions, in at least one cell, tissue or organ. Table 4a below gives examples of constitutive promoters.

TABLE 4a
Examples of constitutive promoters

| Gene Source | Reference |
|---|---|
| Actin | McElroy et al, Plant Cell, 2: 163-171, 1990 |
| HMGP | WO 2004/070039 |
| CAMV 35S | Odell et al, Nature, 313: 810-812, 1985 |
| CaMV 19S | Nilsson et al., Physiol. Plant. 100: 456-462, 1997 |
| GOS2 | de Pater et al, Plant J Nov; 2(6): 837-44, 1992, |
| | WO 2004/065596 |
| Ubiquitin | Christensen et al, Plant Mol. Biol. 18: 675-689, 1992 |
| Rice cyclophilin | Buchholz et al, Plant Mol Biol. 25(5): 837-43, 1994 |
| Maize H3 histone | Lepetit et al, Mol. Gen. Genet. 231: 276-285, 1992 |
| Alfalfa H3 | Wu et al. Plant Mol. Biol. 11: 641-649, 1988 |
| histone | |
| Actin 2 | An et al, Plant J. 10(1); 107-121, 1996 |
| 34S FMV | Sanger et al., Plant. Mol. Biol., 14, 1990: 433-443 |
| Rubisco small | U.S. Pat. No. 4,962,028 |
| subunit | |
| OCS | Leisner (1988) Proc Natl Acad Sci USA 85(5): 2553 |
| SAD1 | Jain et al., Crop Science, 39 (6), 1999: 1696 |
| SAD2 | Jain et al., Crop Science, 39 (6), 1999: 1696 |
| nos | Shaw et al. (1984) Nucleic Acids Res. 12(20): 7831- |
| | 7846 |
| V-ATPase | WO 01/14572 |
| Super promoter | WO 95/14098 |
| G-box proteins | WO 94/12015 |

### Ubiquitous Promoter

[0103] A ubiquitous promoter is active in substantially all tissues or cells of an organism.

### Developmentally-Regulated Promoter

[0104] A developmentally-regulated promoter is active during certain developmental stages or in parts of the plant that undergo developmental changes.

### Inducible Promoter

[0105] An inducible promoter has induced or increased transcription initiation in response to a chemical (for a review see Gatz 1997, Annu. Rev. Plant Physiol. Plant Mol. Biol., 48:89-108), environmental or physical stimulus, or may be “stress-inducible”, i.e. activated when a plant is exposed to various stress conditions, or a “pathogen-inducible” i.e. activated when a plant is exposed to exposure to various pathogens.

### Organ-Specific/Tissue-Specific Promoter

[0106] An organ-specific or tissue-specific promoter is one that is capable of preferentially initiating transcription in certain organs or tissues, such as the leaves, roots, seed tissue etc. For example, a “root-specific promoter” is a promoter that is transcriptionally active predominantly in plant roots, substantially to the exclusion of any other parts of a plant, whilst still allowing for any leaky expression in these other plant parts. Promoters able to initiate transcription in certain cells only are referred to herein as “cell-specific”.

[0107] A seed-specific promoter is transcriptionally active predominantly in seed tissue, but not necessarily exclusively in seed tissue (in cases of leaky expression). The seed-specific promoter may be active during seed development and/or during germination. The seed specific promoter may be endosperm/aleurone/embryo specific. Examples of seed-specific promoters are shown in Tables 4b to 4e below. Further examples of seed-specific promoters are given in Qing Qu and Takaiwa (Plant Biotechnol. J. 2, 113-125, 2004), which disclosure is incorporated by reference herein as if fully set forth.

TABLE 4b
Examples of seed-specific promoters

| Gene source | Reference |
|---|---|
| seed-specific genes | Simon et al., Plant Mol. Biol. 5: 191, 1985; |
| | Scofield et al., J. Biol. Chem. 262: 12202, 1987.; |
| | Baszczynski et al., Plant Mol. Biol. 14: 633, 1990. |
| Brazil Nut albumin | Pearson et al., Plant Mol. Biol. 18: 235-245, 1992. |
| legumin | Ellis et al., Plant Mol. Biol. 10: 203-214, 1988. |
| glutelin (rice) | Takaiwa et al., Mol. Gen. Genet. 208: 15-22, 1986; |
| | Takaiwa et al., FEBS Letts. 221: 43-47, 1987. |
| zein | Matzke et al Plant Mol Biol, 14(3): 323-32 1990 |
| napA | Stalberg et al, Planta 199: 515-519, 1996. |
| wheat LMW and HMW glutenin-1 | Mol Gen Genet 216: 81-90, 1989; NAR 17: 461-2, 1989 |
| wheat SPA | Albani et al, Plant Cell, 9: 171-184, 1997 |
| wheat α, β, γ-gliadins | EMBO J. 3: 1409-15, 1984 |
| barley Itr1 promoter | Diaz et al. (1995) Mol Gen Genet 248(5): 592-8 |
| barley B1, C, D, hordein | Theor Appl Gen 98: 1253-62, 1999; Plant J 4: 343-55, 1993; |
| | Mol Gen Genet 250: 750-60, 1996 |
| barley DOF | Mena et al, The Plant Journal, 116(1): 53-62, 1998 |
| blz2 | EP99106056.7 |
| synthetic promoter | Vicente-Carbajosa et al., Plant J. 13: 629-640, 1998. |
| rice prolamin NRP33 | Wu et al, Plant Cell Physiology 39(8) 885-889, 1998 |
| rice a-globulin Glb-1 | Wu et al, Plant Cell Physiology 39(8) 885-889, 1998 |
| rice OSH1 | Sato et al, Proc. Natl. Acad. Sci. USA, 93: 8117-8122, 1996 |
| rice α-globulin REB/OHP-1 | Nakase et al. Plant Mol. Biol. 33: 513-522, 1997 |
| rice ADP-glucose pyrophosphorylase | Trans Res 6: 157-68, 1997 |
| maize ESR gene family | Plant J 12: 235-46, 1997 |
| sorghum α-kafirin | DeRose et al., Plant Mol. Biol 32: 1029-35, 1996 |
| KNOX | Postma-Haarsma et al, Plant Mol. Biol. 39: 257-71, 1999 |
| rice oleosin | Wu et al, J. Biochem. 123: 386, 1998 |
| sunflower oleosin | Cummins et al., Plant Mol. Biol. 19: 873-876, 1992 |
| PRO0117, putative rice 40S | WO 2004/070039 |
| ribosomal protein | |
| PRO0136, rice alanine | unpublished |
| aminotransferase | |
| PRO0147, trypsin inhibitor ITR1 | unpublished |
| (barley) | |
| PRO0151, rice WSI18 | WO 2004/070039 |
| PRO0175, rice RAB21 | WO 2004/070039 |
| PRO005 | WO 2004/070039 |
| PRO0095 | WO 2004/070039 |
| α-amylase (Amy32b) | Lanahan et al, Plant Cell 4: 203-211, 1992; Skriver et al, Proc |
| | Natl Acad Sci USA 88: 7266-7270, 1991 |
| cathepsin β-like gene | Cejudo et al, Plant Mol Biol 20: 849-856, 1992 |
| Barley Ltp2 | Kalla et al., Plant J. 6: 849-60, 1994 |
| Chi26 | Leah et al., Plant J. 4: 579-89, 1994 |
| Maize B-Peru | Selinger et al., Genetics 149; 1125-38, 1998 |

TABLE 4c
examples of endosperm-specific promoters

| Gene source | Reference |
|---|---|
| glutelin (rice) | Takaiwa et al. (1986) Mol Gen Genet 208: 15-22; Takaiwa et al. |
| | (1987) FEBS Letts. 221: 43-47 |
| zein | Matzke et al., (1990) Plant Mol Biol 14(3): 323-32 |
| wheat LMW and HMW | Colot et al. (1989) Mol Gen Genet 216: 81-90, Anderson et al. |
| glutenin-1 | (1989) NAR 17: 461-2 |
| wheat SPA | Albani et al. (1997) Plant Cell 9: 171-184 |
| wheat gliadins | Rafalski et al. (1984) EMBO 3: 1409-15 |
| barley ltr1 promoter | Diaz et al. (1995) Mol Gen Genet 248(5): 592-8 |
| barley B1, C, D, hordein | Cho et al. (1999) Theor Appl Genet 98: 1253-62; Muller et al. |
| | (1993) Plant J 4: 343-55; Sorenson et al. (1996) Mol Gen Genet |
| | 250: 750-60 |
| barley DOF | Mena et al, (1998) Plant J 116(1): 53-62 |
| blz2 | Onate et al. (1999) J Biol Chem 274(14): 9175-82 |
| synthetic promoter | Vicente-Carbajosa et al. (1998) Plant J 13: 629-640 |
| rice prolamin NRP33 | Wu et al, (1998) Plant Cell Physiol 39(8) 885-889 |
| rice globulin Glb-1 | Wu et al. (1998) Plant Cell Physiol 39(8) 885-889 |
| rice globulin REB/OHP-1 | Nakase et al. (1997) Plant Molec Biol 33: 513-522 |
| rice ADP-glucose | Russell et al. (1997) Trans Res 6: 157-68 |
| pyrophosphorylase | |
| maize ESR gene family | Opsahl-Ferstad et al. (1997) Plant J 12: 235-46 |
| sorghum kafirin | DeRose et al. (1996) Plant Mol Biol 32: 1029-35 |

TABLE 4d
Examples of embryo specific promoters:

| Gene source | Reference |
|---|---|
| rice OSH1 | Sato et al, Proc. Natl. Acad. Sci. USA, 93: |
| | 8117-8122, 1996 |
| KNOX | Postma-Haarsma et al, Plant Mol. Biol. 39: |
| | 257-71, 1999 |
| PRO0151 | WO 2004/070039 |
| PRO0175 | WO 2004/070039 |
| PRO005 | WO 2004/070039 |
| PRO0095 | WO 2004/070039 |

TABLE 4e
Examples of aleurone-specific promoters:

| Gene source | Reference |
|---|---|
| α-amylase (Amy32b) | Lanahan et al, Plant Cell 4: 203-211, 1992; |
| | Skriver et al, Proc Natl Acad Sci USA 88: |
| | 7266-7270, 1991 |
| cathepsin β-like | Cejudo et al, Plant Mol Biol 20: 849-856, 1992 |
| gene | |
| Barley Ltp2 | Kalla et al., Plant J. 6: 849-60, 1994 |
| Chi26 | Leah et al., Plant J. 4: 579-89, 1994 |
| Maize B-Peru | Selinger et al., Genetics 149; 1125-38, 1998 |

[0108] A green tissue-specific promoter as defined herein is a promoter that is transcriptionally active predominantly in green tissue, substantially to the exclusion of any other parts of a plant, whilst still allowing for any leaky expression in these other plant parts.

[0109] Another example of a tissue-specific promoter is a meristem-specific promoter, which is transcriptionally active predominantly in meristematic tissue, substantially to the exclusion of any other parts of a plant, whilst still allowing for any leaky expression in these other plant parts.

### Terminator

[0110] The term “terminator” encompasses a control sequence which is a DNA sequence at the end of a transcriptional unit which signals 3′ processing and polyadenylation of a primary transcript and termination of transcription. The terminator can be derived from the natural gene, from a variety of other plant genes, or from T-DNA. The terminator to be added may be derived from, for example, the nopaline synthase or octopine synthase genes, or alternatively from another plant gene, or less preferably from any other eukaryotic gene.

### Modulation

[0111] The term “modulation” means in relation to expression or gene expression, a process in which the expression level is changed by said gene expression in comparison to the control plant, the expression level may be increased or decreased. The original, unmodulated expression may be of any kind of expression of a structural RNA (rRNA, tRNA) or mRNA with subsequent translation. The term “modulating the activity” shall mean any change of the expression of the inventive nucleic acid sequences or encoded proteins, which leads to increased yield and/or increased growth of the plants.

### Expression

[0112] The term “expression” or “gene expression” means the transcription of a specific gene or specific genes or specific genetic construct. The term “expression” or “gene expression” in particular means the transcription of a gene or genes or genetic construct into structural RNA (rRNA, tRNA) or mRNA with or without subsequent translation of the latter into a protein. The process includes transcription of DNA and processing of the resulting mRNA product.

### Increased Expression/Overexpression

[0113] The term “increased expression” or “overexpression” as used herein means any form of expression that is additional to the original wild-type expression level.

[0114] Methods for increasing expression of genes or gene products are well documented in the art and include, for example, overexpression driven by appropriate promoters, the use of transcription enhancers or translation enhancers. Isolated nucleic acids which serve as promoter or enhancer elements may be introduced in an appropriate position (typically upstream) of a non-heterologous form of a polynucleotide so as to upregulate expression of a nucleic acid encoding the polypeptide of interest. For example, endogenous promoters may be altered in vivo by mutation, deletion, and/or substitution (see, Kmiec, U.S. Pat. No. 5,565,350; Zarling et al., WO9322443), or isolated promoters may be introduced into a plant cell in the proper orientation and distance from a gene of the present invention so as to control the expression of the gene.

[0115] If polypeptide expression is desired, it is generally desirable to include a polyadenylation region at the 3′-end of a polynucleotide coding region. The polyadenylation region can be derived from the natural gene, from a variety of other plant genes, or from T-DNA. The 3′ end sequence to be added may be derived from, for example, the nopaline synthase or octopine synthase genes, or alternatively from another plant gene, or less preferably from any other eukaryotic gene.

[0116] An intron sequence may also be added to the 5′ untranslated region (UTR) or the coding sequence of the partial coding sequence to increase the amount of the mature message that accumulates in the cytosol. Inclusion of a spliceable intron in the transcription unit in both plant and animal expression constructs has been shown to increase gene expression at both the mRNA and protein levels up to 1000-fold (Buchman and Berg (1988) Mol. Cell biol. 8: 4395-4405; Callis et al. (1987) Genes Dev 1:1183-1200). Such intron enhancement of gene expression is typically greatest when placed near the 5′ end of the transcription unit. Use of the maize introns Adh1-5 intron 1, 2, and 6, the Bronze-1 intron are known in the art. For general information see: The Maize Handbook, Chapter 116, Freeling and Walbot, Eds., Springer, N.Y. (1994).

### Endogenous Gene

[0117] Reference herein to an “endogenous” gene not only refers to the gene in question as found in a plant in its natural form (i.e., without there being any human intervention), but also refers to that same gene (or a substantially homologous nucleic acid/gene) in an isolated form subsequently (re)introduced into a plant (a transgene). For example, a transgenic plant containing such a transgene may encounter a substantial reduction of the transgene expression and/or substantial reduction of expression of the endogenous gene. The isolated gene may be isolated from an organism or may be manmade, for example by chemical synthesis.

### Decreased Expression

[0118] Reference herein to “decreased expression” or “reduction or substantial elimination” of expression is taken to mean a decrease in endogenous gene expression and/or polypeptide levels and/or polypeptide activity relative to control plants. The reduction or substantial elimination is in increasing order of preference at least 10%, 20%, 30%, 40% or 50%, 60%, 70%, 80%, 85%, 90%, or 95%, 96%, 97%, 98%, 99% or more reduced compared to that of control plants.

[0119] For the reduction or substantial elimination of expression an endogenous gene in a plant, a sufficient length of substantially contiguous nucleotides of a nucleic acid sequence is required. In order to perform gene silencing, this may be as little as 20, 19, 18, 17, 16, 15, 14, 13, 12, 11, 10 or fewer nucleotides, alternatively this may be as much as the entire gene (including the 5′ and/or 3′ UTR, either in part or in whole). The stretch of substantially contiguous nucleotides may be derived from the nucleic acid encoding the protein of interest (target gene), or from any nucleic acid capable of encoding an orthologue, paralogue or homologue of the protein of interest. Preferably, the stretch of substantially contiguous nucleotides is capable of forming hydrogen bonds with the target gene (either sense or antisense strand), more preferably, the stretch of substantially contiguous nucleotides has, in increasing order of preference, 50%, 60%, 70%, 80%, 85%, 90%, 95%, 96%, 97%, 98%, 99%, 100% sequence identity to the target gene (either sense or antisense strand). A nucleic acid sequence encoding a (functional) polypeptide is not a requirement for the various methods discussed herein for the reduction or substantial elimination of expression of an endogenous gene.

[0120] This reduction or substantial elimination of expression may be achieved using routine tools and techniques. A preferred method for the reduction or substantial elimination of endogenous gene expression is by introducing and expressing in a plant a genetic construct into which the nucleic acid (in this case a stretch of substantially contiguous nucleotides derived from the gene of interest, or from any nucleic acid capable of encoding an orthologue, paralogue or homologue of any one of the protein of interest) is cloned as an inverted repeat (in part or completely), separated by a spacer (non-coding DNA).

[0121] In such a preferred method, expression of the endogenous gene is reduced or substantially eliminated through RNA-mediated silencing using an inverted repeat of a nucleic acid or a part thereof (in this case a stretch of substantially contiguous nucleotides derived from the gene of interest, or from any nucleic acid capable of encoding an orthologue, paralogue or homologue of the protein of interest), preferably capable of forming a hairpin structure. The inverted repeat is cloned in an expression vector comprising control sequences. A non-coding DNA nucleic acid sequence (a spacer, for example a matrix attachment region fragment (MAR), an intron, a polylinker, etc.) is located between the two inverted nucleic acids forming the inverted repeat. After transcription of the inverted repeat, a chimeric RNA with a self-complementary structure is formed (partial or complete). This double-stranded RNA structure is referred to as the hairpin RNA (hpRNA). The hpRNA is processed by the plant into siRNAs that are incorporated into an RNA-induced silencing complex (RISC). The RISC further cleaves the mRNA transcripts, thereby substantially reducing the number of mRNA transcripts to be translated into polypeptides. For further general details see for example, Grierson et al. (1998) WO 98/53083; Waterhouse et al. (1999) WO 99/53050).

[0122] Performance of the methods of the invention does not rely on introducing and expressing in a plant a genetic construct into which the nucleic acid is cloned as an inverted repeat, but any one or more of several well-known “gene silencing” methods may be used to achieve the same effects.

[0123] One such method for the reduction of endogenous gene expression is RNA-mediated silencing of gene expression (downregulation). Silencing in this case is triggered in a plant by a double stranded RNA sequence (dsRNA) that is substantially similar to the target endogenous gene. This dsRNA is further processed by the plant into about 20 to about 26 nucleotides called short interfering RNAs (siRNAs). The siRNAs are incorporated into an RNA-induced silencing complex (RISC) that cleaves the mRNA transcript of the endogenous target gene, thereby substantially reducing the number of mRNA transcripts to be translated into a polypeptide. Preferably, the double stranded RNA sequence corresponds to a target gene.

[0124] Another example of an RNA silencing method involves the introduction of nucleic acid sequences or parts thereof (in this case a stretch of substantially contiguous nucleotides derived from the gene of interest, or from any nucleic acid capable of encoding an orthologue, paralogue or homologue of the protein of interest) in a sense orientation into a plant. “Sense orientation” refers to a DNA sequence that is homologous to an mRNA transcript thereof. Introduced into a plant would therefore be at least one copy of the nucleic acid sequence. The additional nucleic acid sequence will reduce expression of the endogenous gene, giving rise to a phenomenon known as co-suppression. The reduction of gene expression will be more pronounced if several additional copies of a nucleic acid sequence are introduced into the plant, as there is a positive correlation between high transcript levels and the triggering of co-suppression.

[0125] Another example of an RNA silencing method involves the use of antisense nucleic acid sequences. An “antisense” nucleic acid sequence comprises a nucleotide sequence that is complementary to a “sense” nucleic acid sequence encoding a protein, i.e. complementary to the coding strand of a double-stranded cDNA molecule or complementary to an mRNA transcript sequence. The antisense nucleic acid sequence is preferably complementary to the endogenous gene to be silenced. The complementarity may be located in the “coding region” and/or in the “non-coding region” of a gene. The term “coding region” refers to a region of the nucleotide sequence comprising codons that are translated into amino acid residues. The term “non-coding region” refers to 5′ and 3′ sequences that flank the coding region that are transcribed but not translated into amino acids (also referred to as 5′ and 3′ untranslated regions).

[0126] Antisense nucleic acid sequences can be designed according to the rules of Watson and Crick base pairing. The antisense nucleic acid sequence may be complementary to the entire nucleic acid sequence (in this case a stretch of substantially contiguous nucleotides derived from the gene of interest, or from any nucleic acid capable of encoding an orthologue, paralogue or homologue of the protein of interest), but may also be an oligonucleotide that is antisense to only a part of the nucleic acid sequence (including the mRNA 5′ and 3′ UTR). For example, the antisense oligonucleotide sequence may be complementary to the region surrounding the translation start site of an mRNA transcript encoding a polypeptide. The length of a suitable antisense oligonucleotide sequence is known in the art and may start from about 50, 45, 40, 35, 30, 25, 20, 15 or 10 nucleotides in length or less. An antisense nucleic acid sequence according to the invention may be constructed using chemical synthesis and enzymatic ligation reactions using methods known in the art. For example, an antisense nucleic acid sequence (e.g., an antisense oligonucleotide sequence) may be chemically synthesized using naturally occurring nucleotides or variously modified nucleotides designed to increase the biological stability of the molecules or to increase the physical stability of the duplex formed between the antisense and sense nucleic acid sequences, e.g., phosphorothioate derivatives and acridine substituted nucleotides may be used. Examples of modified nucleotides that may be used to generate the antisense nucleic acid sequences are well known in the art. Known nucleotide modifications include methylation, cyclization and ‘caps’ and substitution of one or more of the naturally occurring nucleotides with an analogue such as inosine. Other modifications of nucleotides are well known in the art.

[0127] The antisense nucleic acid sequence can be produced biologically using an expression vector into which a nucleic acid sequence has been subcloned in an antisense orientation (i.e., RNA transcribed from the inserted nucleic acid will be of an antisense orientation to a target nucleic acid of interest). Preferably, production of antisense nucleic acid sequences in plants occurs by means of a stably integrated nucleic acid construct comprising a promoter, an operably linked antisense oligonucleotide, and a terminator.

[0128] The nucleic acid molecules used for silencing in the methods of the invention (whether introduced into a plant or generated in situ) hybridize with or bind to mRNA transcripts and/or genomic DNA encoding a polypeptide to thereby inhibit expression of the protein, e.g., by inhibiting transcription and/or translation. The hybridization can be by conventional nucleotide complementarity to form a stable duplex, or, for example, in the case of an antisense nucleic acid sequence which binds to DNA duplexes, through specific interactions in the major groove of the double helix. Antisense nucleic acid sequences may be introduced into a plant by transformation or direct injection at a specific tissue site. Alternatively, antisense nucleic acid sequences can be modified to target selected cells and then administered systemically. For example, for systemic administration, antisense nucleic acid sequences can be modified such that they specifically bind to receptors or antigens expressed on a selected cell surface, e.g., by linking the antisense nucleic acid sequence to peptides or antibodies which bind to cell surface receptors or antigens. The antisense nucleic acid sequences can also be delivered to cells using the vectors described herein.

[0129] According to a further aspect, the antisense nucleic acid sequence is an a-anomeric nucleic acid sequence. An a-anomeric nucleic acid sequence forms specific double-stranded hybrids with complementary RNA in which, contrary to the usual b-units, the strands run parallel to each other (Gaultier et al. (1987) Nucl Ac Res 15: 6625-6641). The antisense nucleic acid sequence may also comprise a 2′-o-methylribonucleotide (Inoue et al. (1987) Nucl Ac Res 15, 6131-6148) or a chimeric RNA-DNA analogue (Inoue et al. (1987) FEBS Lett. 215, 327-330).

[0130] The reduction or substantial elimination of endogenous gene expression may also be performed using ribozymes. Ribozymes are catalytic RNA molecules with ribonuclease activity that are capable of cleaving a single-stranded nucleic acid sequence, such as an mRNA, to which they have a complementary region. Thus, ribozymes (e.g., hammerhead ribozymes (described in Haselhoff and Gerlach (1988) Nature 334, 585-591) can be used to catalytically cleave mRNA transcripts encoding a polypeptide, thereby substantially reducing the number of mRNA transcripts to be translated into a polypeptide. A ribozyme having specificity for a nucleic acid sequence can be designed (see for example: Cech et al. U.S. Pat. No. 4,987,071; and Cech et al. U.S. Pat. No. 5,116,742). Alternatively, mRNA transcripts corresponding to a nucleic acid sequence can be used to select a catalytic RNA having a specific ribonuclease activity from a pool of RNA molecules (Bartel and Szostak (1993) Science 261, 1411-1418). The use of ribozymes for gene silencing in plants is known in the art (e.g., Atkins et al. (1994) WO 94/00012; Lenne et al. (1995) WO 95/03404; Lutziger et al. (2000) WO 00/00619; Prinsen et al. (1997) WO 97/13865 and Scott et al. (1997) WO 97/38116).

[0131] Gene silencing may also be achieved by insertion mutagenesis (for example, T-DNA insertion or transposon insertion) or by strategies as described by, among others, Angell and Baulcombe ((1999) Plant J 20(3): 357-62), (Amplicon VIGS WO 98/36083), or Baulcombe (WO 99/15682).

[0132] Gene silencing may also occur if there is a mutation on an endogenous gene and/or a mutation on an isolated gene/nucleic acid subsequently introduced into a plant. The reduction or substantial elimination may be caused by a non-functional polypeptide. For example, the polypeptide may bind to various interacting proteins; one or more mutation(s) and/or truncation(s) may therefore provide for a polypeptide that is still able to bind interacting proteins (such as receptor proteins) but that cannot exhibit its normal function (such as signalling ligand).

[0133] A further approach to gene silencing is by targeting nucleic acid sequences complementary to the regulatory region of the gene (e.g., the promoter and/or enhancers) to form triple helical structures that prevent transcription of the gene in target cells. See Helene, C., Anticancer Drug Res. 6, 569-84, 1991; Helene et al., Ann. N.Y. Acad. Sci. 660, 27-36 1992; and Maher, L. J. Bioassays 14, 807-15, 1992.

[0134] Other methods, such as the use of antibodies directed to an endogenous polypeptide for inhibiting its function in planta, or interference in the signalling pathway in which a polypeptide is involved, will be well known to the skilled man. In particular, it can be envisaged that manmade molecules may be useful for inhibiting the biological function of a target polypeptide, or for interfering with the signalling pathway in which the target polypeptide is involved.

[0135] Alternatively, a screening program may be set up to identify in a plant population natural variants of a gene, which variants encode polypeptides with reduced activity. Such natural variants may also be used for example, to perform homologous recombination.

[0136] Artificial and/or natural microRNAs (miRNAs) may be used to knock out gene expression and/or mRNA translation. Endogenous miRNAs are single stranded small RNAs of typically 19-24 nucleotides long. They function primarily to regulate gene expression and/or mRNA translation. Most plant microRNAs (miRNAs) have perfect or near-perfect complementarity with their target sequences. However, there are natural targets with up to five mismatches. They are processed from longer non-coding RNAs with characteristic fold-back structures by double-strand specific RNases of the Dicer family. Upon processing, they are incorporated in the RNA-induced silencing complex (RISC) by binding to its main component, an Argonaute protein. MiRNAs serve as the specificity components of RISC, since they base-pair to target nucleic acids, mostly mRNAs, in the cytoplasm. Subsequent regulatory events include target mRNA cleavage and destruction and/or translational inhibition. Effects of miRNA overexpression are thus often reflected in decreased mRNA levels of target genes.

[0137] Artificial microRNAs (amiRNAs), which are typically 21 nucleotides in length, can be genetically engineered specifically to negatively regulate gene expression of single or multiple genes of interest. Determinants of plant microRNA target selection are well known in the art. Empirical parameters for target recognition have been defined and can be used to aid in the design of specific amiRNAs, (Schwab et al., Dev. Cell 8, 517-527, 2005). Convenient tools for design and generation of amiRNAs and their precursors are also available to the public (Schwab et al., Plant Cell 18, 1121-1133, 2006).

[0138] For optimal performance, the gene silencing techniques used for reducing expression in a plant of an endogenous gene requires the use of nucleic acid sequences from monocotyledonous plants for transformation of monocotyledonous plants, and from dicotyledonous plants for transformation of dicotyledonous plants. Preferably, a nucleic acid sequence from any given plant species is introduced into that same species. For example, a nucleic acid sequence from rice is transformed into a rice plant. However, it is not an absolute requirement that the nucleic acid sequence to be introduced originates from the same plant species as the plant in which it will be introduced. It is sufficient that there is substantial homology between the endogenous target gene and the nucleic acid to be introduced.

[0139] Described above are examples of various methods for the reduction or substantial elimination of expression in a plant of an endogenous gene. A person skilled in the art would readily be able to adapt the aforementioned methods for silencing so as to achieve reduction of expression of an endogenous gene in a whole plant or in parts thereof through the use of an appropriate promoter, for example.

### Selectable Marker (Gene)/Reporter Gene

[0140] “Selectable marker”, “selectable marker gene” or “reporter gene” includes any gene that confers a phenotype on a cell in which it is expressed to facilitate the identification and/or selection of cells that are transfected or transformed with a nucleic acid construct of the invention. These marker genes enable the identification of a successful transfer of the nucleic acid molecules via a series of different principles. Suitable markers may be selected from markers that confer antibiotic or herbicide resistance, that introduce a new metabolic trait or that allow visual selection. Examples of selectable marker genes include genes conferring resistance to antibiotics (such as nptII that phosphorylates neomycin and kanamycin, or hpt, phosphorylating hygromycin, or genes conferring resistance to, for example, bleomycin, streptomycin, tetracyclin, chloramphenicol, ampicillin, gentamycin, geneticin (G418), spectinomycin or blasticidin), to herbicides (for example bar which provides resistance to Basta®; aroA or gox providing resistance against glyphosate, or the genes conferring resistance to, for example, imidazolinone, phosphinothricin or sulfonylurea), or genes that provide a metabolic trait (such as manA that allows plants to use mannose as sole carbon source or xylose isomerase for the utilisation of xylose, or antinutritive markers such as the resistance to 2-deoxyglucose). Expression of visual marker genes results in the formation of colour (for example β-glucuronidase, GUS or β-galactosidase with its coloured substrates, for example X-Gal), luminescence (such as the luciferin/luceferase system) or fluorescence (Green Fluorescent Protein, GFP, and derivatives thereof). This list represents only a small number of possible markers. The skilled worker is familiar with such markers. Different markers are preferred, depending on the organism and the selection method.

[0141] It is known that upon stable or transient integration of nucleic acids into plant cells, only a minority of the cells takes up the foreign DNA and, if desired, integrates it into its genome, depending on the expression vector used and the transfection technique used. To identify and select these integrants, a gene coding for a selectable marker (such as the ones described above) is usually introduced into the host cells together with the gene of interest. These markers can for example be used in mutants in which these genes are not functional by, for example, deletion by conventional methods. Furthermore, nucleic acid molecules encoding a selectable marker can be introduced into a host cell on the same vector that comprises the sequence encoding the polypeptides of the invention or used in the methods of the invention, or else in a separate vector. Cells which have been stably transfected with the introduced nucleic acid can be identified for example by selection (for example, cells which have integrated the selectable marker survive whereas the other cells die).

[0142] Since the marker genes, particularly genes for resistance to antibiotics and herbicides, are no longer required or are undesired in the transgenic host cell once the nucleic acids have been introduced successfully, the process according to the invention for introducing the nucleic acids advantageously employs techniques which enable the removal or excision of these marker genes. One such a method is what is known as co-transformation. The co-transformation method employs two vectors simultaneously for the transformation, one vector bearing the nucleic acid according to the invention and a second bearing the marker gene(s). A large proportion of transformants receives or, in the case of plants, comprises (up to 40% or more of the transformants), both vectors. In case of transformation with Agrobacteria, the transformants usually receive only a part of the vector, i.e. the sequence flanked by the T-DNA, which usually represents the expression cassette. The marker genes can subsequently be removed from the transformed plant by performing crosses. In another method, marker genes integrated into a transposon are used for the transformation together with desired nucleic acid (known as the Ac/Ds technology). The transformants can be crossed with a transposase source or the transformants are transformed with a nucleic acid construct conferring expression of a transposase, transiently or stable. In some cases (approx. 10%), the transposon jumps out of the genome of the host cell once transformation has taken place successfully and is lost. In a further number of cases, the transposon jumps to a different location. In these cases the marker gene must be eliminated by performing crosses. In microbiology, techniques were developed which make possible, or facilitate, the detection of such events. A further advantageous method relies on what is known as recombination systems; whose advantage is that elimination by crossing can be dispensed with. The best-known system of this type is what is known as the Cre/lox system. Cre1 is a recombinase that removes the sequences located between the loxP sequences. If the marker gene is integrated between the loxP sequences, it is removed once transformation has taken place successfully, by expression of the recombinase. Further recombination systems are the HIN/HIX, FLP/FRT and REP/STB system (Tribble et al., J. Biol. Chem., 275, 2000: 22255-22267; Velmurugan et al., J. Cell Biol., 149, 2000: 553-566). A site-specific integration into the plant genome of the nucleic acid sequences according to the invention is possible. Naturally, these methods can also be applied to microorganisms such as yeast, fungi or bacteria.

### Transgenic/Transgene/Recombinant

[0143] For the purposes of the invention, “transgenic”, “transgene” or “recombinant” means with regard to, for example, a nucleic acid sequence, an expression cassette, gene construct or a vector comprising the nucleic acid sequence or an organism transformed with the nucleic acid sequences, expression cassettes or vectors according to the invention, all those constructions brought about by recombinant methods in which either
[0144] (a) the nucleic acid sequences encoding proteins useful in the methods of the invention, or
[0145] (b) genetic control sequence(s) which is operably linked with the nucleic acid sequence according to the invention, for example a promoter, or
[0146] (c) a) and b)
   are not located in their natural genetic environment or have been modified by recombinant methods, it being possible for the modification to take the form of, for example, a substitution, addition, deletion, inversion or insertion of one or more nucleotide residues. The natural genetic environment is understood as meaning the natural genomic or chromosomal locus in the original plant or the presence in a genomic library. In the case of a genomic library, the natural genetic environment of the nucleic acid sequence is preferably retained, at least in part. The environment flanks the nucleic acid sequence at least on one side and has a sequence length of at least 50 bp, preferably at least 500 bp, especially preferably at least 1000 bp, most preferably at least 5000 bp. A naturally occurring expression cassette—for example the naturally occurring combination of the natural promoter of the nucleic acid sequences with the corresponding nucleic acid sequence encoding a polypeptide useful in the methods of the present invention, as defined above—becomes a transgenic expression cassette when this expression cassette is modified by non-natural, synthetic (“artificial”) methods such as, for example, mutagenic treatment. Suitable methods are described, for example, in U.S. Pat. No. 5,565,350 or WO 00/15815.

[0147] A transgenic plant for the purposes of the invention is thus understood as meaning, as above, that the nucleic acids used in the method of the invention are not at their natural locus in the genome of said plant, it being possible for the nucleic acids to be expressed homologously or heterologously. However, as mentioned, transgenic also means that, while the nucleic acids according to the invention or used in the inventive method are at their natural position in the genome of a plant, the sequence has been modified with regard to the natural sequence, and/or that the regulatory sequences of the natural sequences have been modified. Transgenic is preferably understood as meaning the expression of the nucleic acids according to the invention at an unnatural locus in the genome, i.e. homologous or, preferably, heterologous expression of the nucleic acids takes place. Preferred transgenic plants are mentioned herein.

### Transformation

[0148] The term “introduction” or “transformation” as referred to herein encompasses the transfer of an exogenous polynucleotide into a host cell, irrespective of the method used for transfer. Plant tissue capable of subsequent clonal propagation, whether by organogenesis or embryogenesis, may be transformed with a genetic construct of the present invention and a whole plant regenerated there from. The particular tissue chosen will vary depending on the clonal propagation systems available for, and best suited to, the particular species being transformed. Exemplary tissue targets include leaf disks, pollen, embryos, cotyledons, hypocotyls, megagametophytes, callus tissue, existing meristematic tissue (e.g., apical meristem, axillary buds, and root meristems), and induced meristem tissue (e.g., cotyledon meristem and hypocotyl meristem). The polynucleotide may be transiently or stably introduced into a host cell and may be maintained non-integrated, for example, as a plasmid. Alternatively, it may be integrated into the host genome. The resulting transformed plant cell may then be used to regenerate a transformed plant in a manner known to persons skilled in the art.

[0149] The transfer of foreign genes into the genome of a plant is called transformation. Transformation of plant species is now a fairly routine technique. Advantageously, any of several transformation methods may be used to introduce the gene of interest into a suitable ancestor cell. The methods described for the transformation and regeneration of plants from plant tissues or plant cells may be utilized for transient or for stable transformation. Transformation methods include the use of liposomes, electroporation, chemicals that increase free DNA uptake, injection of the DNA directly into the plant, particle gun bombardment, transformation using viruses or pollen and microprojection. Methods may be selected from the calcium/polyethylene glycol method for protoplasts (Krens, F. A. et al., (1982) Nature 296, 72-74; Negrutiu I et al. (1987) Plant Mol Biol 8: 363-373); electroporation of protoplasts (Shillito R. D. et al. (1985) Bio/Technol 3, 1099-1102); microinjection into plant material (Crossway A et al., (1986) Mol. Gen Genet 202: 179-185); DNA or RNA-coated particle bombardment (Klein T M et al., (1987) Nature 327: 70) infection with (non-integrative) viruses and the like. Transgenic plants, including transgenic crop plants, are preferably produced via Agrobacterium-mediated transformation. An advantageous transformation method is the transformation in planta. To this end, it is possible, for example, to allow the agrobacteria to act on plant seeds or to inoculate the plant meristem with agrobacteria. It has proved particularly expedient in accordance with the invention to allow a suspension of transformed agrobacteria to act on the intact plant or at least on the flower primordia. The plant is subsequently grown on until the seeds of the treated plant are obtained (Clough and Bent, Plant J. (1998) 16, 735-743). Methods for Agrobacterium-mediated transformation of rice include well known methods for rice transformation, such as those described in any of the following: European patent application EP 1198985 A1, Aldemita and Hodges (Planta 199: 612-617, 1996); Chan et al. (Plant Mol Biol 22 (3): 491-506, 1993), Hiei et al. (Plant J 6 (2): 271-282, 1994), which disclosures are incorporated by reference herein as if fully set forth. In the case of corn transformation, the preferred method is as described in either Ishida et al. (Nat. Biotechnol 14(6): 745-50, 1996) or Frame et al. (Plant Physiol 129(1): 13-22, 2002), which disclosures are incorporated by reference herein as if fully set forth. Said methods are further described by way of example in B. Jenes et al., Techniques for Gene Transfer, in: Transgenic Plants, Vol. 1, Engineering and Utilization, eds. S. D. Kung and R. Wu, Academic Press (1993) 128-143 and in Potrykus Annu. Rev. Plant Physiol. Plant Molec. Biol. 42 (1991) 205-225). The nucleic acids or the construct to be expressed is preferably cloned into a vector, which is suitable for transforming Agrobacterium tumefaciens, for example pBin19 (Bevan et al., Nucl. Acids Res. 12 (1984) 8711). Agrobacteria transformed by such a vector can then be used in known manner for the transformation of plants, such as plants used as a model, like Arabidopsis (Arabidopsis thaliana is within the scope of the present invention not considered as a crop plant), or crop plants such as, by way of example, tobacco plants, for example by immersing bruised leaves or chopped leaves in an agrobacterial solution and then culturing them in suitable media. The transformation of plants by means of Agrobacterium tumefaciens is described, for example, by Höfgen and Willmitzer in Nucl. Acid Res. (1988) 16, 9877 or is known inter alia from F. F. White, Vectors for Gene Transfer in Higher Plants; in Transgenic Plants, Vol. 1, Engineering and Utilization, eds. S. D. Kung and R. Wu, Academic Press, 1993, pp. 15-38.

[0150] In addition to the transformation of somatic cells, which then have to be regenerated into intact plants, it is also possible to transform the cells of plant meristems and in particular those cells which develop into gametes. In this case, the transformed gametes follow the natural plant development, giving rise to transgenic plants. Thus, for example, seeds of Arabidopsis are treated with agrobacteria and seeds are obtained from the developing plants of which a certain proportion is transformed and thus transgenic [Feldman, K A and Marks M D (1987). Mol Gen Genet 208:274-289; Feldmann K (1992). In: C Koncz, N-H Chua and J Shell, eds, Methods in Arabidopsis Research. Word Scientific, Singapore, pp. 274-289]. Alternative methods are based on the repeated removal of the inflorescences and incubation of the excision site in the center of the rosette with transformed agrobacteria, whereby transformed seeds can likewise be obtained at a later point in time (Chang (1994). Plant J. 5: 551-558; Katavic (1994). Mol Gen Genet, 245: 363-370). However, an especially effective method is the vacuum infiltration method with its modifications such as the “floral dip” method. In the case of vacuum infiltration of Arabidopsis, intact plants under reduced pressure are treated with an agrobacterial suspension [Bechthold, N (1993). C R Acad Sci Paris Life Sci, 316: 1194-1199], while in the case of the “floral dip” method the developing floral tissue is incubated briefly with a surfactant-treated agrobacterial suspension [Clough, S J and Bent A F (1998) The Plant J. 16, 735-743]. A certain proportion of transgenic seeds are harvested in both cases, and these seeds can be distinguished from non-transgenic seeds by growing under the above-described selective conditions. In addition the stable transformation of plastids is of advantages because plastids are inherited maternally is most crops reducing or eliminating the risk of transgene flow through pollen. The transformation of the chloroplast genome is generally achieved by a process which has been schematically displayed in Klaus et al., 2004 [Nature Biotechnology 22 (2), 225-229]. Briefly the sequences to be transformed are cloned together with a selectable marker gene between flanking sequences homologous to the chloroplast genome. These homologous flanking sequences direct site specific integration into the plastome. Plastidal transformation has been described for many different plant species and an overview is given in Bock (2001) Transgenic plastids in basic research and plant biotechnology. J Mol Biol. 2001 Sep. 21; 312 (3):425-38 or Maliga, P (2003) Progress towards commercialization of plastid transformation technology. Trends Biotechnol. 21, 20-28. Further biotechnological progress has recently been reported in form of marker free plastid transformants, which can be produced by a transient co-integrated maker gene (Klaus et al., 2004, Nature Biotechnology 22(2), 225-229).

### T-DNA Activation Tagging

[0151] T-DNA activation tagging (Hayashi et al. Science (1992) 1350-1353), involves insertion of T-DNA, usually containing a promoter (may also be a translation enhancer or an intron), in the genomic region of the gene of interest or 10 kb up- or downstream of the coding region of a gene in a configuration such that the promoter directs expression of the targeted gene. Typically, regulation of expression of the targeted gene by its natural promoter is disrupted and the gene falls under the control of the newly introduced promoter. The promoter is typically embedded in a T-DNA. This T-DNA is randomly inserted into the plant genome, for example, through Agrobacterium infection and leads to modified expression of genes near the inserted T-DNA. The resulting transgenic plants show dominant phenotypes due to modified expression of genes close to the introduced promoter.

### TILLING

[0152] The term “TILLING” is an abbreviation of “Targeted Induced Local Lesions In Genomes” and refers to a mutagenesis technology useful to generate and/or identify nucleic acids encoding proteins with modified expression and/or activity. TILLING also allows selection of plants carrying such mutant variants. These mutant variants may exhibit modified expression, either in strength or in location or in timing (if the mutations affect the promoter for example). These mutant variants may exhibit higher activity than that exhibited by the gene in its natural form. TILLING combines high-density mutagenesis with high-throughput screening methods. The steps typically followed in TILLING are: (a) EMS mutagenesis (Redei G P and Koncz C (1992) In Methods in Arabidopsis Research, Koncz C, Chua N H, Schell J, eds. Singapore, World Scientific Publishing Co, pp. 16-82; Feldmann et al., (1994) In Meyerowitz E M, Somerville C R, eds, Arabidopsis. Cold Spring Harbor Laboratory Press, Cold Spring Harbor, N.Y., pp 137-172; Lightner J and Caspar T (1998) In J Martinez-Zapater, J Salinas, eds, Methods on Molecular Biology, Vol. 82. Humana Press, Totowa, N.J., pp 91-104); (b) DNA preparation and pooling of individuals; (c) PCR amplification of a region of interest; (d) denaturation and annealing to allow formation of heteroduplexes; (e) DHPLC, where the presence of a heteroduplex in a pool is detected as an extra peak in the chromatogram; (f) identification of the mutant individual; and (g) sequencing of the mutant PCR product. Methods for TILLING are well known in the art (McCallum et al., (2000) Nat Biotechnol 18: 455-457; reviewed by Stemple (2004) Nat Rev Genet 5(2): 145-50).

### Homologous Recombination

[0153] Homologous recombination allows introduction in a genome of a selected nucleic acid at a defined selected position. Homologous recombination is a standard technology used routinely in biological sciences for lower organisms such as yeast or the moss Physcomitrella. Methods for performing homologous recombination in plants have been described not only for model plants (Offringa et al. (1990) EMBO J 9(10): 3077-84) but also for crop plants, for example rice (Terada et al. (2002) Nat Biotech 20(10): 1030-4; Iida and Terada (2004) Curr Opin Biotech 15(2): 132-8).

### Yield

[0154] The term “yield” in general means a measurable produce of economic value, typically related to a specified crop, to an area, and to a period of time. Individual plant parts directly contribute to yield based on their number, size and/or weight, or the actual yield is the yield per square meter for a crop and year, which is determined by dividing total production (includes both harvested and appraised production) by planted square meters. The term “yield” of a plant may relate to vegetative biomass (root and/or shoot biomass), to reproductive organs, and/or to propagules (such as seeds) of that plant.

### Early Vigour

[0155] “Early vigour” refers to active healthy well-balanced growth especially during early stages of plant growth, and may result from increased plant fitness due to, for example, the plants being better adapted to their environment (i.e. optimizing the use of energy resources and partitioning between shoot and root). Plants having early vigour also show increased seedling survival and a better establishment of the crop, which often results in highly uniform fields (with the crop growing in uniform manner, i.e. with the majority of plants reaching the various stages of development at substantially the same time), and often better and higher yield. Therefore, early vigour may be determined by measuring various factors, such as thousand kernel weight, percentage germination, percentage emergence, seedling growth, seedling height, root length, root and shoot biomass and many more.

### Increase/Improve/Enhance

[0156] The terms “increase”, “improve” or “enhance” are interchangeable and shall mean in the sense of the application at least a 3%, 4%, 5%, 6%, 7%, 8%, 9% or 10%, preferably at least 15% or 20%, more preferably 25%, 30%, 35% or 40% more yield and/or growth in comparison to control plants as defined herein.

### Seed Yield

[0157] Increased seed yield may manifest itself as one or more of the following: a) an increase in seed biomass (total seed weight) which may be on an individual seed basis and/or per plant and/or per square meter; b) increased number of flowers per plant; c) increased number of (filled) seeds; d) increased seed filling rate (which is expressed as the ratio between the number of filled seeds divided by the total number of seeds); e) increased harvest index, which is expressed as a ratio of the yield of harvestable parts, such as seeds, divided by the total biomass; and f) increased thousand kernel weight (TKW), which is extrapolated from the number of filled seeds counted and their total weight. An increased TKW may result from an increased seed size and/or seed weight, and may also result from an increase in embryo and/or endosperm size.

[0158] An increase in seed yield may also be manifested as an increase in seed size and/or seed volume. Furthermore, an increase in seed yield may also manifest itself as an increase in seed area and/or seed length and/or seed width and/or seed perimeter. Increased yield may also result in modified architecture, or may occur because of modified architecture.

### Greenness Index

[0159] The “greenness index” as used herein is calculated from digital images of plants. For each pixel belonging to the plant object on the image, the ratio of the green value versus the red value (in the RGB model for encoding color) is calculated. The greenness index is expressed as the percentage of pixels for which the green-to-red ratio exceeds a given threshold. Under normal growth conditions, under salt stress growth conditions, and under reduced nutrient availability growth conditions, the greenness index of plants is measured in the last imaging before flowering. In contrast, under drought stress growth conditions, the greenness index of plants is measured in the first imaging after drought.

### Plant

[0160] The term “plant” as used herein encompasses whole plants, ancestors and progeny of the plants and plant parts, including seeds, shoots, stems, leaves, roots (including tubers), flowers, and tissues and organs, wherein each of the aforementioned comprise the gene/nucleic acid of interest. The term “plant” also encompasses plant cells, suspension cultures, callus tissue, embryos, meristematic regions, gametophytes, sporophytes, pollen and microspores, again wherein each of the aforementioned comprises the gene/nucleic acid of interest.

[0161] Plants that are particularly useful in the methods of the invention include all plants which belong to the superfamily Viridiplantae, in particular monocotyledonous and dicotyledonous plants including fodder or forage legumes, ornamental plants, food crops, trees or shrubs selected from the list comprising Acer spp., Actinidia spp., Abelmoschus spp., Agave sisalana, Agropyron spp., Agrostis stolonifera, Allium spp., Amaranthus spp., Ammophila arenaria, Ananas comosus, Annona spp., Apium graveolens, Arachis spp, Artocarpus spp., Asparagus officinalis, Avena spp. (e.g. Avena sativa, Avena fatua, Avena byzantina, Avena fatua var. sativa, Avena hybrida), Averrhoa carambola, Bambusa sp., Benincasa hispida, Bertholletia excelsea, Beta vulgaris, Brassica spp. (e.g. Brassica napus, Brassica rapa ssp. [canola, oilseed rape, turnip rape]), Cadaba farinosa, Camellia sinensis, Canna indica, Cannabis sativa, Capsicum spp., Carex elata, Carica papaya, Carissa macrocarpa, Carya spp., Carthamus tinctorius, Castanea spp., Ceiba pentandra, Cichorium endivia, Cinnamomum spp., Citrullus lanatus, Citrus spp., Cocos spp., Coffea spp., Colocasia esculenta, Cola spp., Corchorus sp., Coriandrum sativum, Corylus spp., Crataegus spp., Crocus sativus, Cucurbita spp., Cucumis spp., Cynara spp., Daucus carota, Desmodium spp., Dimocarpus longan, Dioscorea spp., Diospyros spp., Echinochloa spp., Elaeis (e.g. Elaeis guineensis, Elaeis oleifera), Eleusine coracana, Erianthus sp., Eriobotrya japonica, Eucalyptus sp., Eugenia uniflora, Fagopyrum spp., Fagus spp., Festuca arundinacea, Ficus carica, Fortunella spp., Fragaria spp., Ginkgo biloba, Glycine spp. (e.g. Glycine max, Soja hispida or Soja max), Gossypium hirsutum, Helianthus spp. (e.g. Helianthus annuus), Hemerocaffis fulva, Hibiscus spp., Hordeum spp. (e.g. Hordeum vulgare), Ipomoea batatas, Juglans spp., Lactuca sativa, Lathyrus spp., Lens culinaris, Linum usitatissimum, Litchi chinensis, Lotus spp., Luffa acutangula, Lupinus spp., Luzula sylvatica, Lycopersicon spp. (e.g. Lycopersicon esculentum, Lycopersicon lycopersicum, Lycopersicon pyriforme), Macrotyloma spp., Malus spp., Malpighia emarginata, Mammea americana, Mangifera indica, Manihot spp., Manilkara zapota, Medicago sativa, Melilotus spp., Mentha spp., Miscanthus sinensis, Momordica spp., Morus nigra, Musa spp., Nicotiana spp., Olea spp., Opuntia spp., Ornithopus spp., Oryza spp. (e.g. Oryza sativa, Oryza latifolia), Panicum miliaceum, Panicum virgatum, Passiflora edulis, Pastinaca sativa, Pennisetum sp., Persea spp., Petroselinum crispum, Phalaris arundinacea, Phaseolus spp., Phleum pratense, Phoenix spp., Phragmites australis, Physalis spp., Pinus spp., Pistacia vera, Pisum spp., Poa spp., Populus spp., Prosopis spp., Prunus spp., Psidium spp., Punica granatum, Pyrus communis, Quercus spp., Raphanus sativus, Rheum rhabarbarum, Ribes spp., Ricinus communis, Rubus spp., Saccharum spp., Salix sp., Sambucus spp., Secale cereale, Sesamum spp., Sinapis sp., Solanum spp. (e.g. Solanum tuberosum, Solanum integrifolium or Solanum lycopersicum), Sorghum bicolor, Spinacia spp., Syzygium spp., Tagetes spp., Tamarindus indica, Theobroma cacao, Trifolium spp., Triticosecale rimpaui, Triticum spp. (e.g. Triticum aestivum, Triticum durum, Triticum turgidum, Triticum hybernum, Triticum macha, Triticum sativum or Triticum vulgare), Tropaeolum minus, Tropaeolum majus, Vaccinium spp., Vicia spp., Vigna spp., Viola odorata, Vitis spp., Zea mays, Zizania palustris, Ziziphus spp., amongst others.

### DETAILED DESCRIPTION OF THE INVENTION

### Detailed Description for the Ankyrin-Zn Finger Polypeptide

[0162] Surprisingly, it has now been found that modulating expression in a plant of a nucleic acid encoding the AZ polypeptide from Arabidopsis (AtAZ) or a homologue thereof gives plants having increased yield relative to control plants. According to one embodiment of the present invention, there is provided a method for increasing plant yield, comprising modulating expression in a plant of a nucleic acid encoding the AZ polypeptide or a homologue thereof. Advantageously, performance of the methods according to the present invention results in plants having increased yield, particularly seed yield, relative to corresponding wild type plants.

[0163] A “reference”, “reference plant”, “control”, “control plant”, “wild type” or “wild type plant” is in particular a cell, a tissue, an organ, a plant, or a part thereof, which was not produced according to the method of the invention. Accordingly, the terms “wild type”, “control” or “reference” are exchangeable and can be a cell or a part of the plant such as an organelle or tissue, or a plant, which was not modified or treated according to the herein described method according to the invention. Accordingly, the cell or a part of the plant such as an organelle or a plant used as wild type, control or reference corresponds to the cell, plant or part thereof as much as possible and is in any other property but in the result of the process of the invention as identical to the subject matter of the invention as possible. Thus, the wild type, control or reference is treated identically or as identical as possible, saying that only conditions or properties might be different which do not influence the quality of the tested property. That means in other words that the wild type denotes (1) a plant, which carries the unaltered or not modulated form of a gene or allele or (2) the starting material/plant from which the plants produced by the process or method of the invention are derived.

[0164] Preferably, any comparison between the wild type plants and the plants produced by the method of the invention is carried out under analogous conditions. The term “analogous conditions” means that all conditions such as, for example, culture or growing conditions, assay conditions (such as buffer composition, temperature, substrates, pathogen strain, concentrations and the like) are kept identical between the experiments to be compared.

[0165] The “reference”, “control”, or “wild type” is preferably a subject, e.g. an organelle, a cell, a tissue, a plant, which was not modulated, modified or treated according to the herein described process of the invention and is in any other property as similar to the subject matter of the invention as possible. The reference, control or wild type is in its genome, transcriptome, proteome or metabolome as similar as possible to the subject of the present invention. Preferably, the term “reference-” “control-” or “wild type-”-organelle, -cell, -tissue or plant, relates to an organelle, cell, tissue or plant, which is nearly genetically identical to the organelle, cell, tissue or plant, of the present invention or a part thereof preferably 95%, more preferred are 98%, even more preferred are 99.00%, in particular 99.10%, 99.30%, 99.50%, 99.70%, 99.90%, 99.99%, 99.999% or more. Most preferably the “reference”, “control”, or “wild type” is a subject, e.g. an organelle, a cell, a tissue, a plant, which is genetically identical to the plant, cell organelle used according to the method of the invention except that nucleic acid molecules or the gene product encoded by them are changed, modulated or modified according to the inventive method.

[0166] The term “expression” or “gene expression” is as defined herein, preferably it results in the appearance of a phenotypic trait as a consequence of the transcription of a specific gene or specific genes.

[0167] The increase referring to the activity of the polypeptide amounts in a cell, a tissue, a organelle, an organ or an organism or a part thereof preferably to at least 5%, preferably to at least 10% or at to least 15%, especially preferably to at least 20%, 25%, 30% or more, very especially preferably are to at least 40%, 50% or 60%, most preferably are to at least 70% or more in comparison to the control, reference or wild type.

[0168] The term “increased yield” as defined herein is taken to mean an increase in biomass (weight) of one or more parts of a plant, which may include aboveground (harvestable) parts and/or (harvestable) parts below ground. In a preferred embodiment, the increased yield is increased seed yield.

[0169] Therefore, such harvestable parts are preferably seeds, and performance of the methods of the invention results in plants having increased seed yield relative to the seed yield of control plants.

[0170] An increase in seed yield may also be manifested as an increase in seed size and/or seed volume, which may also influence the composition of seeds (including oil, protein and carbohydrate total content and composition).

[0171] Taking corn as an example, a yield increase may be manifested as one or more of the following: increase in the number of plants per square meter, an increase in the number of ears per plant, an increase in the number of rows, number of kernels per row, kernel weight, thousand kernel weight, ear length/diameter, increase in seed filling rate (which is the number of filled seeds divided by the total number of seeds and multiplied by 100), among others. Taking rice as an example, a yield increase may be manifested by an increase in one or more of the following: number of plants per square meter, number of panicles per plant, number of spikelets per panicle, number of flowers (florets) per panicle (which is expressed as a ratio of the number of filled seeds over the number of primary panicles), increase in the seed filling rate, (which is the number of filled seeds divided by the total number of seeds and multiplied by 100), increase in thousand kernel weight, among others. An increase in yield may also result in modified architecture, or may occur as a result of modified architecture.

[0172] According to a preferred feature, performance of the methods of the invention result in plants having increased yield, particularly seed yield. Therefore, according to the present invention, there is provided a method for increasing plant yield, which method comprises modulating expression in a plant of a nucleic acid encoding the AZ polypeptide or a homologue thereof.

[0173] Since the transgenic plants according to the present invention have increased yield, it is likely that these plants exhibit an increased growth rate (during at least part of their life cycle), relative to the growth rate of control plants at a corresponding stage in their life cycle. The increased growth rate may be specific to one or more parts of a plant (including seeds), or may be throughout substantially the whole plant. Plants having an increased growth rate may have a shorter life cycle. The life cycle of a plant may be taken to mean the time needed to grow from a dry mature seed up to the stage where the plant has produced dry mature seeds, similar to the starting material. This life cycle may be influenced by factors such as early vigour, growth rate, greenness index, flowering time and speed of seed maturation. The increase in growth rate may take place at one or more stages in the life cycle of a plant or during substantially the whole plant life cycle. Increased growth rate during the early stages in the life cycle of a plant may reflect enhanced vigour. The increase in growth rate may alter the harvest cycle of a plant allowing plants to be sown later and/or harvested sooner than would otherwise be possible (a similar effect may be obtained with earlier flowering time). If the growth rate is sufficiently increased, it may allow for the further sowing of seeds of the same plant species (for example sowing and harvesting of rice plants followed by sowing and harvesting of further rice plants all within one conventional growing period). Similarly, if the growth rate is sufficiently increased, it may allow for the further sowing of seeds of different plants species (for example the planting and harvesting of corn plants followed by, for example, the planting and optional harvesting of soy bean, potato or any other suitable plant). Harvesting additional times from the same rootstock in the case of some crop plants may also be possible. Altering the harvest cycle of a plant may lead to an increase in annual biomass production per square meter (due to an increase in the number of times (say in a year) that any particular plant may be grown and harvested). An increase in growth rate may also allow for the cultivation of transgenic plants in a wider geographical area than their wild-type counterparts, since the territorial limitations for growing a crop are often determined by adverse environmental conditions either at the time of planting (early season) or at the time of harvesting (late season). Such adverse conditions may be avoided if the harvest cycle is shortened. The growth rate may be determined by deriving various parameters from growth curves, such parameters may be: T-Mid (the time taken for plants to reach 50% of their maximal size) and T-90 (time taken for plants to reach 90% of their maximal size), amongst others.

[0174] According to a preferred feature of the present invention, performance of the methods of the invention gives plants having an increased growth rate or increased yield in comparison to control plants. Therefore, according to the present invention, there is provided a method for increasing yield and/or growth rate in plants, which method comprises modulating expression in a plant of a nucleic acid encoding the AZ polypeptide or a homologue thereof.

[0175] An increase in yield and/or growth rate occurs whether the plant is under non-stress conditions or whether the plant is exposed to various stresses compared to control plants. Plants typically respond to exposure to stress by growing more slowly. In conditions of severe stress, the plant may even stop growing altogether. Mild stress on the other hand is defined herein as being any stress to which a plant is exposed which does not result in the plant ceasing to grow altogether without the capacity to resume growth. Mild stress in the sense of the invention leads to a reduction in the growth of the stressed plants of less than 40%, 35% or 30%, preferably less than 25%, 20% or 15%, more preferably less than 14%, 13%, 12%, 11% or 10% or less in comparison to the control plant under non-stress conditions. Due to advances in agricultural practices (irrigation, fertilization, pesticide treatments) severe stresses are not often encountered in cultivated crop plants. As a consequence, the compromised growth induced by mild stress is often an undesirable feature for agriculture. Mild stresses are the everyday biotic and/or abiotic (environmental) stresses to which a plant is exposed. Abiotic stresses may be due to drought or excess water, anaerobic stress, salt stress, chemical toxicity, oxidative stress and hot, cold or freezing temperatures. The abiotic stress may be an osmotic stress caused by a water stress (particularly due to drought), salt stress, oxidative stress or an ionic stress. Biotic stresses are typically those stresses caused by pathogens, such as bacteria, viruses, fungi and insects.

[0176] In particular, the methods of the present invention may be performed under non-stress conditions or under conditions of mild drought to give plants having increased yield relative to control plants. As reported in Wang et al. (Planta (2003) 218: 1-14), abiotic stress leads to a series of morphological, physiological, biochemical and molecular changes that adversely affect plant growth and productivity. Drought, salinity, extreme temperatures and oxidative stress are known to be interconnected and may induce growth and cellular damage through similar mechanisms. Rabbani et al. (Plant Physiol (2003) 133: 1755-1767) describes a particularly high degree of “cross talk” between drought stress and high-salinity stress. For example, drought and/or salinisation are manifested primarily as osmotic stress, resulting in the disruption of homeostasis and ion distribution in the cell. Oxidative stress, which frequently accompanies high or low temperature, salinity or drought stress, may cause denaturing of functional and structural proteins. As a consequence, these diverse environmental stresses often activate similar cell signaling pathways and cellular responses, such as the production of stress proteins, up-regulation of anti-oxidants, accumulation of compatible solutes and growth arrest. The term “non-stress” conditions as used herein are those environmental conditions that do not impose stress, such as the stresses described above, on plants. Non-stress conditions allow optimal growth of plants. Persons skilled in the art are aware of normal soil conditions and climatic conditions for a given location.

[0177] Performance of the methods of the invention gives plants grown under non-stress conditions or under mild drought conditions increased yield relative to control plants grown under comparable conditions. Therefore, according to the present invention, there is provided a method for increasing yield in plants grown under non-stress conditions or under mild drought conditions, which method comprises increasing expression in a plant of a nucleic acid encoding a AZ polypeptide.

[0178] In a preferred embodiment of the invention, the increase in yield and/or growth rate occurs according to the methods of the present invention under non-stress conditions.

[0179] Performance of the methods of the invention gives plants grown under conditions of nutrient deficiency, particularly under conditions of nitrogen deficiency, increased yield relative to control plants grown under comparable conditions. Therefore, according to the present invention, there is provided a method for increasing yield in plants grown under conditions of nutrient deficiency, which method comprises increasing expression in a plant of a nucleic acid encoding a AZ polypeptide. Nutrient deficiency may result from a lack of nutrients such as nitrogen, phosphates and other phosphorous-containing compounds, potassium, calcium, cadmium, magnesium, manganese, iron and boron, amongst others.

[0180] The methods of the invention are advantageously applicable to any plant. The abovementioned growth characteristics may advantageously be modified in any plant. Plants that are particularly useful in the methods of the invention include all plants which belong to the superfamily Viridiplantae, in particular monocotyledonous and dicotyledonous plants including fodder or forage legumes, ornamental plants, food crops, trees or shrubs. According to a preferred embodiment of the present invention, the plant is a crop plant. Examples of crop plants include soybean, sunflower, canola, alfalfa, rapeseed, cotton, tomato, potato and tobacco. Further preferably, the plant is a monocotyledonous plant. Examples of monocotyledonous plants include sugarcane. More preferably the plant is a cereal. Examples of cereals include rice, maize, wheat, barley, millet, rye, triticale, sorghum and oats.

[0181] Other advantageous plants are selected from the group consisting of Asteraceae such as the genera Helianthus, Tagetes e.g. the species Helianthus annuus [sunflower], Tagetes lucida, Tagetes erecta or Tagetes tenuifolia [Marigold]; Brassicaceae such as the genus Brassica, e.g. the species Brassica napus, Brassica rapa ssp. [canola, oilseed rape, turnip rape]; Fabaceae such as the genera Glycine e.g. the species Glycine max, Soja hispida or Soja max [soybean]; Linaceae such as the genera Linum e.g. the species Linum usitatissimum, [flax, linseed]; Poaceae such as the genera Hordeum, Secale, Avena, Sorghum, Oryza, Zea, Triticum e.g. the species Hordeum vulgare [barley], Secale cereale [rye], Avena sativa, Avena fatua, Avena byzantina, Avena fatua var. sativa, Avena hybrida [oat], Sorghum bicolor [sorghum, millet], Oryza sativa, Oryza latifolia [rice], Zea mays [corn, maize] Triticum aestivum, Triticum durum, Triticum turgidum, Triticum hybernum, Triticum macha, Triticum sativum or Triticum vulgare [wheat, bread wheat, common wheat]; Solanaceae such as the genera Solanum, Lycopersicon e.g. the species Solanum tuberosum [potato], Lycopersicon esculentum, Lycopersicon lycopersicum, Lycopersicon pyriforme, Solanum integrifolium or Solanum lycopersicum [tomato].

[0182] The term “AtAZ polypeptide or a homologue thereof” as defined herein refers to proteins that comprise at least one ankyrin repeat and at least one Zinc-finger C3H1 domain, which ankyrin repeat is located upstream of the C3H1 domain. Preferably, the AZ protein comprises two ankyrin repeats and two Zinc-finger C3H1 domains such as in the protein represented in SEQ ID NO: 2. Also preferably, the two ankyrin repeats are located close to each other. Further preferably, the Zinc-finger C3H1 domains are also located close to each other and C-terminally of the ankyrin repeats. In SEQ ID NO: 2, the ankyrin repeats are located on positions D90 to R120 and D125 to L157, the two Zn-finger domains are located on positions H301 to V327 and Q336 to P359 (FIG. 1).

[0183] Also preferably, the AtAZ protein comprises at least one of the following consensus sequences:

(motif 1, SEQ ID NO: 3)
(P/A)CSRAY(S/T)HDWTEC
(motif 2, SEQ ID NO: 4)
HPGENARRRDPR
(motif 3, SEQ ID NO: 5)
HG(V/I)FE(C/S)WLHP(A/S)QY(R/K)TRLCK
(motif 4, SEQ ID NO: 6)
CFFAH

[0184] Preferably motif 1 is PCSRAYSHDWTEC, and motif 3 is preferably HGVFECWLHPAQYRTRLCK.

[0185] More preferably, the AtAZ protein comprises two of the above-mentioned motifs, especially preferably 3 of the above-mentioned motifs, most preferably all four motifs.

[0186] The ankyrin repeat (SMART SM00248, Interpro IPR002110), as described in the Interpro database, is one of the most common protein-protein interaction motifs in nature. Ankyrin repeats are (usually tandemly) repeated modules of usually about 33 amino acids. They occur in a large number of functionally diverse proteins mainly from eukaryotes. The few known examples from prokaryotes and viruses may be the result of horizontal gene transfers. The repeat has been found in proteins of diverse function such as transcriptional initiators, cell-cycle regulators, cytoskeletal, ion transporters and signal transducers. The ankyrin fold appears to be defined by its structure rather than its function since there is no specific sequence or structure which is universally recognised by it. The conserved fold of the ankyrin repeat unit is known from several crystal and solution structures. Each repeat folds into a helix-loop-helix structure with a beta-hairpin/loop region projecting out from the helices at a 90° angle. The repeats stack together to form an L-shaped structure.

[0187] The Zinc-finger domain ZnF_C3H1 (also known as Znf_CCCH, SMART SM00356; Interpro IPR000571), as described in the Interpro database is thought to be involved in DNA-binding. Zinc fingers exist as different types, depending on the positions of the cysteine residues. Proteins containing zinc finger domains of the C-x8-C-x5-C-x3-H (SEQ ID NO: 349) type (wherein x represents any amino acid and the digits 8, 5 and 3 represent the number of amino acids between the conserved C or H residues) include zinc finger proteins from eukaryotes involved in cell cycle or growth phase-related regulation, e.g. human TIS11B (butyrate response factor 1), a probable regulatory protein involved in regulating the response to growth factors, and the mouse TTP growth factor-inducible nuclear protein, which has the same function. The mouse TTP protein is induced by growth factors. Another protein containing this domain is the human splicing factor U2AF 35 kD subunit, which plays a critical role in both constitutive and enhancer-dependent splicing by mediating essential protein-protein interactions and protein-RNA interactions required for 3′ splice site selection. It has been shown that different CCCH zinc finger proteins interact with the 3′ untranslated region of various mRNA. This type of zinc finger is very often present in two copies.

[0188] FIG. 2 describes the consensus sequences as defined in the SMART database for the ankyrin domain and the zinc-finger domain; however it should be noted that these consensus sequences might be biased towards animal protein sequences.

[0189] The terms “domain” and “motif” are defined in the “definitions” section herein. Specialist databases exist for the identification of domains. The C3H1 or ankyrin domain in a AZ protein may be identified using, for example, SMART (Schultz et al. (1998) Proc. Natl. Acad. Sci. USA 95, 5857-5864; Letunic et al. (2002) Nucleic Acids Res 30, 242-244), InterPro (Mulder et al., (2003) Nucl. Acids. Res. 31, 315-318), Prosite (Bucher and Bairoch (1994), A generalized profile syntax for biomolecular sequences motifs and its function in automatic sequence interpretation. (In) ISMB-94; Proceedings 2nd International Conference on Intelligent Systems for Molecular Biology. Altman R., Brutlag D., Karp P., Lathrop R., Searls D., Eds., pp 53-61, AAAIPress, Menlo Park; Hulo et al., Nucl. Acids. Res. 32:D134-D137, (2004)) or Pfam (Bateman et al., Nucleic Acids Research 30(1): 276-280 (2002)). A set of tools for in silico analysis of protein sequences is available on the ExPASY proteomics server (hosted by the Swiss Institute of Bioinformatics (Gasteiger et al., ExPASy: the proteomics server for in-depth protein knowledge and analysis, Nucleic Acids Res. 31:3784-3788 (2003)). The AZ protein sequence was analysed with the SMART tool (version 4.1; Schultz et al. (1998) Proc. Natl. Acad. Sci. USA 95, 5857-5864; Letunic et al. (2002) Nucleic Acids Res 30, 242-244) and was used to screen the Pfam (Version 17.0, March 2005; Bateman et al. (2004) Nucl. Acids Res. 32, D138-141) and InterPro database (Release 11.0, 26 Jul. 2005; Mulder et al. (2005) Nucl. Acids. Res. 33, D201-205).

[0190] By aligning other protein sequences with SEQ ID NO: 2, the corresponding consensus sequences, the C3H1 domain, the ankyrin domain or other sequence motifs may easily be identified. In this way, AZ polypeptides or homologues thereof (encompassing orthologues and paralogues) may readily be identified, using routine techniques well known in the art, such as by sequence alignment. Methods for the alignment of sequences for comparison are well known in the art, such methods include GAP, BESTFIT, BLAST, FASTA and TFASTA. GAP uses the algorithm of Needleman and Wunsch ((1970) J Mol Biol 48: 443-453) to find the alignment of two complete sequences that maximizes the number of matches and minimizes the number of gaps. The BLAST algorithm (Altschul et al. (1990) J Mol Biol 215: 403-10) calculates percent sequence identity and performs a statistical analysis of the similarity between the two sequences. The software for performing BLAST analysis is publicly available through the National Centre for Biotechnology Information.

[0191] Homologues may readily be identified using, for example, the ClustalW multiple sequence alignment algorithm (version 1.83), with the default pairwise alignment parameters, and a scoring method in percentage. Global percentages of similarity and identity may also be determined using one of the methods available in the MatGAT software package (Campanella et al., BMC Bioinformatics. 2003 Jul. 10; 4:29. MatGAT: an application that generates similarity/identity matrices using protein or DNA sequences.). Minor manual editing may be performed to optimise alignment between conserved motifs, as would be apparent to a person skilled in the art. Furthermore, instead of using full-length sequences for the identification of homologues, specific domains (such as the C3H1 or ankyrin domain, or one of the motifs defined above) may be used as well. The sequence identity values, which are indicated below as a percentage were determined over the entire conserved domain or nucleic acid or amino acid sequence using the programs mentioned above using the default parameters.

[0192] Examples of AZ proteins or homologues thereof include the protein sequences listed in Table A of Example 1.

[0193] It is to be understood that sequences falling under the definition of “AZ polypeptide or homologue thereof” are not to be limited to the polypeptide sequences listed in Table A of Example 1, but that any polypeptide comprising at least one ankyrin repeat, and at least one C3H1 zinc finger domain and preferably also at least one of the consensus sequence of SEQ ID NO: 3, 4, 5 or 6 as defined above, may be suitable for use in the methods of the invention. Preferably, the polypeptide is a polypeptide from Arabidopsis thaliana.

[0194] Encompassed by the term “homologues” are orthologous sequences and paralogous sequences. Orthologues and paralogues may be found by performing a so-called reciprocal blast search. This may be done by a first BLAST involving BLASTing a query sequence (for example, SEQ ID NO: 1 or SEQ ID NO: 2) against any sequence database, such as the publicly available NCBI database. BLASTN or TBLASTX (using standard default values) may be used when starting from a nucleotide sequence and BLASTP or TBLASTN (using standard default values) may be used when starting from a protein sequence. The BLAST results may optionally be filtered. The full-length sequences of either the filtered results or non-filtered results are then BLASTed back (second BLAST) against sequences from the organism from which the query sequence is derived (where the query sequence is SEQ ID NO: 1 or SEQ ID NO: 2, the second BLAST would therefore be against Arabidopsis sequences). The results of the first and second BLASTs are then compared. A paralogue is identified if a high-ranking hit from the second BLAST is from the same species as from which the query sequence is derived; an orthologue is identified if a high-ranking hit is not from the same species as from which the query sequence is derived. Preferred orthologues are orthologues of SEQ ID NO: 1 or SEQ ID NO: 2. High-ranking hits are those having a low E-value. The lower the E-value, the more significant the score (or in other words the lower the chance that the hit was found by chance). Computation of the E-value is well known in the art. In addition to E-values, comparisons are also scored by percentage identity. Percentage identity refers to the number of identical nucleotides (or amino acids) between the two compared nucleic acid (or polypeptide) sequences over a particular length. Preferably the score is greater than 50, more preferably greater than 100; and preferably the E-value is less than e-5, more preferably less than e-6. In the case of large families, ClustalW may be used, followed by the generation of a neighbour joining tree, to help visualize clustering of related genes and to identify orthologues and paralogues. Examples of sequences orthologous to SEQ ID NO: 2 include SEQ ID NO: 11, SEQ ID NO: 15 and SEQ ID NO: 17. SEQ ID NO: 19 is an example of a paralogue of SEQ ID NO: 2.

[0195] Preferably, the AZ proteins useful in the methods of the present invention have, besides at least one ankyrin repeat and at least one C3H1 domain, in increasing order of preference, at least 26%, 30%, 35%, 40%, 45%, 50%, 55%, 60%, 65%, 70%, 75%, 80%, 85%, 90%, 95%, 96%, 97%, 98% or 99% sequence identity to the protein of SEQ ID NO: 2. The matrix shown in FIGS. 3A and 3B (Matrix A) shows similarities and identities (in bold) over the full-length of various AZ proteins. In case only specific domains are compared, the identity or similarity may be higher among the different proteins (Matrix B: comparison of a Zn-finger domain sequence).

[0196] An assay may be carried out to determine AZ activity. DNA-binding activity and protein-protein interactions may readily be determined in vitro or in vivo using techniques well known in the art. Examples of in vitro assays for DNA binding activity include: gel retardation analysis or yeast one-hybrid assays. An example of an in vitro assay for protein-protein interactions is the yeast two-hybrid analysis (Fields and Song (1989) Nature 340:245-6).

[0197] Furthermore, expression of the AZ protein or of a homologue thereof in plants, and in particular in rice, has the effect of increasing yield of the transgenic plant when compared to corresponding wild type plants, wherein increased yield comprises at least one of: total weight of seeds, total number of seeds and number of filled seeds.

[0198] An AZ polypeptide or homologue thereof is encoded by an AZ nucleic acid/gene. Therefore the term “AZ nucleic acid/gene” as defined herein is any nucleic acid/gene encoding an AZ polypeptide or a homologue thereof as defined above. Examples of AZ nucleic acids include but are not limited to those represented in Table A of Example 1. AZ nucleic acids/genes and variants thereof may be suitable in practising the methods of the invention. Preferably, the variants of an AZ gene originate from Arabidopsis thaliana. Variant AZ nucleic acid/genes include portions of an AZ nucleic acid/gene, splice variants, allelic variants and/or nucleic acids capable of hybridising with an AZ nucleic acid/gene.

[0199] Reference herein to a “nucleic acid sequence” is taken to mean a polymeric form of a deoxyribonucleotide or a ribonucleotide polymer of any length, either double- or single-stranded, or analogues thereof, that has the essential characteristic of a natural ribonucleotide in that it can hybridise to nucleic acid sequences in a manner similar to naturally occurring polynucleotides.

[0200] The term portion as defined herein refers to a piece of DNA encoding a polypeptide comprising at least one ankyrin repeat and at least one C3H1 Zn-finger domain. A portion may be prepared, for example, by making one or more deletions to an AZ nucleic acid. The portions may be used in isolated form or they may be fused to other coding (or non-coding) sequences in order to, for example, produce a protein that combines several activities. When fused to other coding sequences, the resulting polypeptide produced upon translation may be bigger than that predicted for the AZ fragment. The portion is typically at least 500, 700 or 900 nucleotides in length, preferably at least 1100, 1300 or 1500 nucleotides in length, more preferably at least 1700, 1900 or 2100 nucleotides in length and most preferably at least 2300 or 2400 nucleotides in length. Preferably, the portion is a portion of a nucleic acid as represented in Table A of Example 1. Most preferably the portion of an AZ nucleic acid is as represented by SEQ ID NO: 1 or SEQ ID NO: 53.

[0201] The terms “fragment”, “fragment of a sequence” or “part of a sequence” “portion” or “portion thereof” mean a truncated sequence of the original sequence referred to. The truncated sequence (nucleic acid or protein sequence) can vary widely in length; the minimum size being a sequence of sufficient size to provide a sequence with at least a comparable function and/or activity of the original sequence referred to or hybridising with the nucleic acid molecule of the invention or used in the process of the invention under stringent conditions, while the maximum size is not critical. In some applications, the maximum size usually is not substantially greater than that required to provide the desired activity and/or function(s) of the original sequence. A comparable function means at least 40%, 45% or 50%, preferably at least 60%, 70%, 80% or 90% or more of the function of the original sequence.

[0202] Another variant of an AZ nucleic acid/gene is a nucleic acid capable of hybridising under reduced stringency conditions, preferably under stringent conditions, with an AZ nucleic acid/gene as hereinbefore defined or with a portion as hereinbefore defined. The hybridizing sequence is typically at least 300 nucleotides in length, preferably at least 400 nucleotides in length, more preferably at least 500 nucleotides in length and most preferably at least 600 nucleotides in length.

[0203] Preferably, the hybridising sequence is one that is capable of hybridising to a nucleic acid as represented by SEQ ID NO: 1, SEQ ID NO: 10, SEQ ID NO: 12, SEQ ID NO: 14, SEQ ID NO: 16, SEQ ID NO: 18, SEQ ID NO: 20, SEQ ID NO: 22, SEQ ID NO: 24, SEQ ID NO: 26, SEQ ID NO: 28, SEQ ID NO: 30, SEQ ID NO: 32, SEQ ID NO: 34, SEQ ID NO: 36, SEQ ID NO: 38, SEQ ID NO: 40, SEQ ID NO: 42 or SEQ ID NO: 53, or to a portion of any of the aforementioned sequences, a portion being defined as above. Most preferably the hybridising sequence is capable of hybridising to SEQ ID NO: 1, to SEQ ID NO: 53, or to portions (or probes) thereof. Methods for designing probes are well known in the art. Probes are generally less than 1000 bp, 900 bp, 800 bp, 700 bp, 600 bp in length, preferably less than 500 bp, 400 bp, 300 bp 200 bp or 100 bp in length. Commonly, probe lengths for DNA-DNA hybridizations such as Southern blotting, vary between 100 and 500 bp, whereas the hybridizing region in probes for DNA-DNA hybridizations such as in PCR amplification generally are shorter than 50 but longer than 10 nucleotides, preferably they are 15, 20, 25, 30, 35, 40, 45 or 50 bp in length.

[0204] Also useful in the methods of the invention are nucleic acids encoding homologues (including orthologues or paralogues) of the amino acid sequence represented by SEQ ID NO: 2, or derivatives thereof.

[0205] Another nucleic acid variant useful in the methods of the present invention is a splice variant encoding an AZ polypeptide as defined above. Preferred splice variants are splice variants of the nucleic acid encoding a polypeptide comprising at least on ankyrin repeat and at least one C3H1 domain. Preferably, the AZ polypeptide or the homologue thereof encoded by the splice variant has at least 26%, 30%, 35%, 40%, 45%, 50%, 55%, 60%, 65%, 70%, 75%, 80%, 85%, 90%, 95%, 96%, 97%, 98% or 99% sequence identity to SEQ ID NO: 2. Further preferred are splice variants represented by the nucleic acids represented in Table A of Example 1. For example, SEQ ID NO: 25 and SEQ ID NO: 47 are encoded by splice variants of the same gene. Most preferred is the splice variant represented by SEQ ID NO: 1 or SEQ ID NO: 53.

[0206] Another nucleic acid variant useful in the methods of the present invention is an allelic variant of a nucleic acid encoding an AZ polypeptide as defined above. Preferably, the polypeptide encoded by the allelic variant is represented by the polypeptide sequences listed in Table A of Example 1. Most preferably, the allelic variant encoding the AZ polypeptide is represented by SEQ ID NO: 1.

[0207] A further nucleic acid variant useful in the methods of the invention is a nucleic acid variant obtained by gene shuffling. Furthermore, site-directed mutagenesis may be used to generate variants of AZ nucleic acids. Several methods are available to achieve site-directed mutagenesis; the most common being PCR based methods (Current Protocols in Molecular Biology. Wiley Eds.).

[0208] Therefore, the invention provides a method for increasing yield and/or growth rate of a plant, comprising modulating expression in a plant of a variant of an AZ nucleic acid selected from:
[0209] (i) a portion of an AZ nucleic acid;
[0210] (ii) a nucleic acid hybridising to an AZ nucleic acid;
[0211] (iii) a splice variant of a nucleic acid encoding an AZ polypeptide;
[0212] (iv) an allelic variant of a nucleic acid encoding an AZ polypeptide; and
[0213] (v) a nucleic acid variant encoding an AZ polypeptide obtained by gene shuffling or site directed mutagenesis.

[0214] The AZ nucleic acid or variant thereof may be derived from any natural or artificial source. This nucleic acid may be modified from its native form in composition and/or genomic environment through deliberate human manipulation. The nucleic acid is preferably of plant origin, further preferably from a dicotyledonous species, further preferably from the family Brassicaceae, more preferably from Arabidopsis thaliana. Most preferably, the AZ nucleic acid is the Arabidopsis thaliana sequence represented by SEQ ID NO: 1, and the AZ amino acid sequence is as represented by SEQ ID NO: 2. Alternatively, the AZ nucleic acid represented by SEQ ID NO: 53 or the AZ amino acid sequence as represented by SEQ ID NO: 47 may also be useful in the methods of the present invention.

[0215] Any reference herein to an AZ polypeptide is therefore taken to mean an AZ protein as defined above. Any nucleic acid encoding such an AZ protein is suitable for use in the methods of the invention.

[0216] According to a preferred aspect of the present invention, modulated, preferably increased expression of the AZ nucleic acid or variant thereof is envisaged. Methods for increasing the expression of genes or gene products are well documented in the art. The expression of a nucleic acid sequence encoding an AZ polypeptide may be modulated by introducing a genetic modification, which may be introduced, for example, by any one (or more) of the following methods: T-DNA activation, TILLING, site-directed mutagenesis, directed evolution and homologous recombination or by introducing and expressing in a plant a nucleic acid encoding an AZ polypeptide or a homologue thereof. Following introduction of the genetic modification, there follows a step of selecting for modified expression of a nucleic acid encoding an AZ polypeptide or a homologue thereof, which modification in expression gives plants having increased yield. Also methods for decreasing the expression of genes or gene products are known in the art.

[0217] T-DNA activation is described above. A genetic modification may also be introduced in the locus of an AZ gene using the technique of TILLING (Targeted Induced Local Lesions In Genomes). The locus of a gene as defined herein is taken to mean a genomic region, which includes the gene of interest and 10 kb up- or down stream of the coding region. Site-directed mutagenesis may be used to generate variants of AZ nucleic acids. Several methods are available to achieve site-directed mutagenesis; the most common being PCR based methods (Current Protocols in Molecular Biology. Wiley Eds.). The effects of the invention may also be produced using homologous recombination.

[0218] A preferred method for introducing a genetic modification is to introduce and express in a plant a nucleic acid encoding an AZ polypeptide or a homologue thereof, as defined above. The nucleic acid to be introduced into a plant may be a full-length nucleic acid or may be a portion or a hybridising sequence as hereinbefore defined.

[0219] The invention furthermore provides genetic constructs and vectors to facilitate introduction and/or expression of the nucleotide sequences useful in the methods according to the invention.

[0220] Therefore, there is provided a gene construct comprising:
[0221] (i) an AZ nucleic acid or variant thereof, as defined hereinabove;
[0222] (ii) one or more control sequences operably linked the nucleic acid sequence of (i);

[0223] Constructs useful in the methods according to the present invention may be created using recombinant DNA technology well known to persons skilled in the art. The gene constructs may be inserted into vectors, which may be commercially available, suitable for transforming into plants and suitable for expression of the gene of interest in the transformed cells. The invention therefore provides use of a gene construct as defined hereinabove in the methods of the invention.

[0224] Plants are transformed with a vector comprising the sequence of interest (i.e., a nucleic acid encoding an AZ polypeptide or homologue thereof). The skilled artisan is well aware of the genetic elements that must be present on the vector in order to successfully transform, select and propagate host cells containing the sequence of interest. The sequence of interest is operably linked to one or more control sequences (at least to a promoter). The terms “regulatory element”, “control sequence” and “promoter” are defined above. Advantageously, any type of promoter may be used to drive expression of the nucleic acid sequence.

[0225] Suitable promoters, which are functional in plants, are generally known. They may take the form of constitutive or inducible promoters. Suitable promoters can enable the developmental- and/or tissue-specific expression in multi-cellular eukaryotes; thus, leaf-, root-, flower-, seed-, stomata-, tuber- or fruit-specific promoters may advantageously be used in plants.

[0226] Different plant promoters usable in plants are promoters such as, for example, the USP, the LegB4-, the DC3 promoter or the ubiquitin promoter from parsley.

[0227] A “plant” promoter comprises regulatory elements, which mediate the expression of a coding sequence segment in plant cells. Accordingly, a plant promoter need not be of plant origin, but may originate from viruses or micro-organisms, in particular for example from viruses which attack plant cells.

[0228] The “plant” promoter can also originate from a plant cell, e.g. from the plant which is transformed with the nucleic acid sequence to be expressed in the inventive process and described herein. This also applies to other “plant” regulatory signals, for example in “plant” terminators.

[0229] For expression in plants, the nucleic acid molecule must, as described above, be linked operably to or comprise a suitable promoter which expresses the gene at the right point in time and in a cell- or tissue-specific manner. Useful promoters are constitutive promoters (Benfey et al., EMBO J. 8 (1989) 2195-2202), such as those which originate from plant viruses, such as 35S CAMV (Franck et al., Cell 21 (1980) 285-294), 19S CaMV (see also U.S. Pat. No. 5,352,605 and WO 84/02913), 34S FMV (Sanger et al., Plant. Mol. Biol., 14, 1990: 433-443), the parsley ubiquitin promoter, or plant promoters such as the Rubisco small subunit promoter described in U.S. Pat. No. 4,962,028 or the plant promoters PRP1 [Ward et al., Plant. Mol. Biol. 22 (1993)], SSU, PGEL1, OCS [Leisner (1988) Proc Natl Acad Sci USA 85(5): 2553-2557], lib4, usp, mas [Comai (1990) Plant Mol Biol 15 (3):373-381], STLS1, ScBV (Schenk (1999) Plant Mol Biol 39(6):1221-1230), B33, SAD1 or SAD2 (flax promoters, Jain et al., Crop Science, 39 (6), 1999: 1696-1701) or nos [Shaw et al. (1984) Nucleic Acids Res. 12(20):7831-7846]. Further examples of constitutive plant promoters are the sugar beet V-ATPase promoters (WO 01/14572). Examples of synthetic constitutive promoters are the Super promoter (WO 95/14098) and promoters derived from G-boxes (WO 94/12015). If appropriate, chemically inducible promoters may furthermore also be used, compare EP-A 388186, EP-A 335528, WO 97/06268. Stable, constitutive expression of the proteins according to the invention a plant can be advantageous. However, inducible expression of the polypeptide of the invention is advantageous, if, for example, late expression before the harvest is of advantage, as metabolic manipulation may lead to plant growth retardation.

[0230] The expression of plant genes can also be facilitated via a chemically inducible promoter. Chemically inducible promoters are particularly suitable when it is desired to express the gene in a time-specific manner. Examples of such promoters are a salicylic acid inducible promoter (WO 95/19443), and abscisic acid-inducible promoter (EP 335 528), a tetracyclin-inducible promoter (Gatz et al. (1992) Plant J. 2, 397-404), a cyclohexanol- or ethanol-inducible promoter (WO 93/21334) or others as described herein.

[0231] Other suitable promoters are those which react to biotic or abiotic stress conditions, for example the pathogen-induced PRP1 gene promoter (Ward et al., Plant. Mol. Biol. 22 (1993) 361-366), the tomato heat-inducible hsp80 promoter (U.S. Pat. No. 5,187,267), the potato chill-inducible alpha-amylase promoter (WO 96/12814) or the wound-inducible pinII promoter (EP-A-0 375 091) or others as described herein.

[0232] Preferred promoters are in particular those which bring gene expression in tissues and organs, in seed cells, such as endosperm cells and cells of the developing embryo. Suitable promoters are the oilseed rape napin gene promoter (U.S. Pat. No. 5,608,152), the Vicia faba USP promoter (Baeumlein et al., Mol Gen Genet, 1991, 225 (3): 459-67), the Arabidopsis oleosin promoter (WO 98/45461), the Phaseolus vulgaris phaseolin promoter (U.S. Pat. No. 5,504,200), the Brassica Bce4 promoter (WO 91/13980), the bean arc5 promoter, the carrot DcG3 promoter, or the Legumin B4 promoter (LeB4; Baeumlein et al., 1992, Plant Journal, 2 (2): 233-9), and promoters which bring about the seed-specific expression in monocotyledonous plants such as maize, barley, wheat, rye, rice and the like. Advantageous seed-specific promoters are the sucrose binding protein promoter (WO 00/26388), the phaseolin promoter and the napin promoter. Suitable promoters which must be considered are the barley Ipt2 or Ipt1 gene promoter (WO 95/15389 and WO 95/23230), and the promoters described in WO 99/16890 (promoters from the barley hordein gene, the rice glutelin gene, the rice oryzin gene, the rice prolamin gene, the wheat gliadin gene, the wheat glutelin gene, the maize zein gene, the oat glutelin gene, the sorghum kasirin gene and the rye secalin gene). Further suitable promoters are Amy32b, Amy 6-6 and Aleurain [U.S. Pat. No. 5,677,474], Bce4 (oilseed rape) [U.S. Pat. No. 5,530,149], glycinin (soya) [EP 571 741], phosphoenolpyruvate carboxylase (soya) [JP 06/62870], ADR12-2 (soya) [WO 98/08962], isocitrate lyase (oilseed rape) [U.S. Pat. No. 5,689,040] or α-amylase (barley) [EP 781 849]. Other promoters which are available for the expression of genes in plants are leaf-specific promoters such as those described in DE-A 19644478 or light-regulated promoters such as, for example, the pea petE promoter.

[0233] Further suitable plant promoters are the cytosolic FBPase promoter or the potato ST-LSI promoter (Stockhaus et al., EMBO J. 8, 1989, 2445), the Glycine max phosphoribosylpyrophosphate amidotransferase promoter (GenBank Accession No. U87999) or the node-specific promoter described in EP-A-0 249 676.

[0234] According to one preferred feature of the invention, the AZ nucleic acid or variant thereof is operably linked to a seed-specific promoter. The seed-specific promoter may be active during seed development and/or during germination. Seed-specific promoters are well known in the art. Preferably, the seed-specific promoter is an embryo specific/endosperm specific/aleurone specific promoter. Further preferably, the seed-specific promoter drives expression in at least one of: the embryo, the endosperm, the aleurone. More preferably, the promoter is a WSI18 or a functionally equivalent promoter. Most preferably, the promoter sequence is as represented by SEQ ID NO: 9 or SEQ ID NO: 55. It should be clear that the applicability of the present invention is not restricted to the AZ nucleic acid represented by SEQ ID NO: 1 or SEQ ID NO: 53, nor is the applicability of the invention restricted to expression of an AZ nucleic acid when driven by a seed-specific promoter. Examples of other seed-specific promoters (embryo specific/endosperm specific/aleurone specific promoters) which may also be used to drive expression of an AZ nucleic acid are provided above.

[0235] According to another preferred feature of the invention, the AZ nucleic acid or variant thereof is operably linked to a constitutive promoter. A preferred constitutive promoter is a constitutive promoter that is also substantially ubiquitously expressed. Further preferably the promoter is derived from a plant, more preferably a monocotyledonous plant. An example of such a promoter is the GOS2 promoter from rice (SEQ ID NO: 54 or SEQ ID NO: 56). It should be clear that the applicability of the present invention is not restricted to the AZ nucleic acid represented by SEQ ID NO: 1, nor is the applicability of the invention restricted to expression of a AZ nucleic acid when driven by a constitutive promoter, and in particular by a GOS2 promoter. Examples of other constitutive promoters which may also be used to drive expression of an AZ nucleic acid are shown above.

[0236] Optionally, one or more terminator sequences may be used in the construct introduced into a plant. Additional regulatory elements may include transcriptional as well as translational enhancers. Those skilled in the art will be aware of terminator and enhancer sequences that may be suitable for use in performing the invention. An intron sequence may also be added to the 5′ untranslated region (UTR) or in the coding sequence to increase the amount of the mature message that accumulates in the cytosol, as described in the definitions section. Other control sequences (besides promoter, enhancer, silencer, intron sequences, 3′UTR and/or 5′UTR regions) may be protein and/or RNA stabilizing elements. Such sequences would be known or may readily be obtained by a person skilled in the art.

[0237] The genetic constructs of the invention may further include an origin of replication sequence that is required for maintenance and/or replication in a specific cell type. One example is when a genetic construct is required to be maintained in a bacterial cell as an episomal genetic element (e.g. plasmid or cosmid molecule). Preferred origins of replication include, but are not limited to, the f1-ori and colE1.

[0238] For the detection of the successful transfer of the nucleic acid sequences as used in the methods of the invention and/or selection of transgenic plants comprising these nucleic acids, it is advantageous to use marker genes (or reporter genes). Therefore, the genetic construct may optionally comprise a selectable marker gene. Selectable markers are described in more detail in the “definitions” section herein. The marker genes may be removed or excised from the transgenic cell once they are no longer needed. Techniques for marker removal are known in the art, useful techniques are described above in the definitions section.

[0239] The present invention also encompasses plants, plant parts or plant cells obtainable by the methods according to the present invention. The present invention therefore provides plants obtainable by the method according to the present invention, which plants have introduced therein an AZ nucleic acid or variant thereof, as defined above.

[0240] The invention also provides a method for the production of transgenic plants having increased yield, comprising introduction and expression in a plant of an AZ nucleic acid or a variant thereof as defined above.

[0241] Host plants for the nucleic acids or the vector used in the method according to the invention, the expression cassette or construct or vector are, in principle, advantageously all plants, which are capable of synthesizing the polypeptides used in the inventive method.

[0242] More specifically, the present invention provides a method for the production of transgenic plants having increased yield, which method comprises:
[0243] (i) introducing and expressing in a plant or plant cell an AZ nucleic acid or variant thereof; and
[0244] (ii) cultivating the plant cell under conditions promoting plant growth and development.

[0245] The nucleic acid may be introduced directly into a plant cell or into the plant itself (including introduction into a tissue, organ or any other part of a plant). According to a preferred feature of the present invention, the nucleic acid is preferably introduced into a plant by transformation. The terms “introduction” or “transformation” are described in more detail in the definitions section.

[0246] Generally after transformation, plant cells or cell groupings are selected for the presence of one or more markers which are encoded by plant-expressible genes co-transferred with the gene of interest, following which the transformed material is regenerated into a whole plant.

[0247] As mentioned, Agrobacteria transformed with an expression vector according to the invention may also be used in the manner known per se for the transformation of plants such as plants used as a model, like Arabidopsis (Arabidopsis thaliana is within the scope of the present invention not considered as a crop plant), or crop plants, such as cereals, maize, oats, rye, barley, wheat, soybean, rice, cotton, sugar beet, canola, sunflower, flax, hemp, potato, tobacco, tomato, carrot, bell peppers, oilseed rape, tapioca, cassava, arrow root, tagetes, alfalfa, lettuce and the various tree, nut, and grapevine species, in particular oil-containing crop plants such as soy, peanut, castor-oil plant, sunflower, maize, cotton, flax, oilseed rape, coconut, oil palm, safflower (Carthamus tinctorius) or cocoa beans, for example by bathing scarred leaves or leaf segments in an agrobacterial solution and subsequently culturing them on suitable media.

[0248] The genetically modified plant cells can be regenerated via all methods with which the skilled worker is familiar. Suitable methods can be found in the abovementioned publications by S. D. Kung and R. Wu, Potrykus or Höfgen and Willmitzer.

[0249] Generally after transformation, plant cells or cell groupings are selected for the presence of one or more markers which are encoded by plant-expressible genes co-transferred with the gene of interest, following which the transformed material is regenerated into a whole plant. To select transformed plants, the plant material obtained in the transformation is, as a rule, subjected to selective conditions so that transformed plants can be distinguished from untransformed plants. For example, the seeds obtained in the above-described manner can be planted and, after an initial growing period, subjected to a suitable selection by spraying. A further possibility consists in growing the seeds, if appropriate after sterilization, on agar plates using a suitable selection agent so that only the transformed seeds can grow into plants. Alternatively, the transformed plants are screened for the presence of a selectable marker such as the ones described above.

[0250] Following DNA transfer and regeneration, putatively transformed plants may be evaluated, for instance using Southern analysis, for the presence of the gene of interest, copy number and/or genomic organisation. Alternatively or additionally, expression levels of the newly introduced DNA may be monitored using Northern and/or Western analysis, both techniques being well known to persons having ordinary skill in the art.

[0251] The generated transformed plants may be propagated by a variety of means, such as by clonal propagation or classical breeding techniques. For example, a first generation (or T1) transformed plant may be selfed and homozygous second-generation (or T2) transformants selected, and the T2 plants may then further be propagated through classical breeding techniques.

[0252] The generated transformed organisms may take a variety of forms. For example, they may be chimeras of transformed cells and non-transformed cells; clonal transformants (e.g., all cells transformed to contain the expression cassette); grafts of transformed and untransformed tissues (e.g., in plants, a transformed rootstock grafted to an untransformed scion).

[0253] The present invention clearly extends to any plant cell or plant produced by any of the methods described herein, and to all plant parts and propagules thereof. The present invention extends further to encompass the progeny of a primary transformed or transfected cell, tissue, organ or whole plant that has been produced by any of the aforementioned methods, the only requirement being that progeny exhibit the same genotypic and/or phenotypic characteristic(s) as those produced by the parent in the methods according to the invention. The invention also includes host cells containing an isolated AZ nucleic acid or variant thereof. Preferred host cells according to the invention are plant cells. The invention also extends to harvestable parts of a plant such as, but not limited to seeds, leaves, fruits, flowers, stem, roots, rhizomes, tubers and bulbs. The invention furthermore relates to products directly derived from a harvestable part of such a plant, such as dry pellets or powders, oil, fat and fatty acids, starch or proteins.

[0254] The present invention also encompasses use of AZ nucleic acids or variants thereof and use of AZ polypeptides or homologues thereof.

[0255] One such use relates to improving the growth characteristics of plants, in particular in improving yield, especially seed yield. The increased seed yield preferably comprises increased thousand kernel weight.

[0256] Nucleic acids encoding AZ polypeptides may find use in breeding programmes in which a DNA marker is identified which may be genetically linked to an AZ gene. The nucleic acids/genes may be used to define a molecular marker. This DNA or protein marker may then be used in breeding programmes to select plants having increased yield.

[0257] Allelic variants of an AZ nucleic acid/gene may also find use in marker-assisted breeding programmes. Such breeding programmes sometimes require introduction of allelic variation by mutagenic treatment of the plants, using for example EMS mutagenesis; alternatively, the programme may start with a collection of allelic variants of so called “natural” origin caused unintentionally. Identification of allelic variants then takes place, for example, by PCR. This is followed by a step for selection of superior allelic variants of the sequence in question and which give increased yield. Selection is typically carried out by monitoring growth performance of plants containing different allelic variants of the sequence in question, for example, different allelic variants of any one of the nucleic acids listed in Table A of Example 1. Growth performance may be monitored in a greenhouse or in the field. Further optional steps include crossing plants, in which the superior allelic variant was identified, with another plant. This could be used, for example, to make a combination of interesting phenotypic features.

[0258] An AZ nucleic acid may also be used as probes for genetically and physically mapping the genes that they are a part of, and as markers for traits linked to those genes. Such information may be useful in plant breeding in order to develop lines with desired phenotypes. Such use of AZ nucleic acids or variants thereof requires only a nucleic acid sequence of at least 15 nucleotides in length. The AZ nucleic acids or variants thereof may be used as restriction fragment length polymorphism (RFLP) markers. Southern blots (Sambrook J, Fritsch E F and Maniatis T (1989) Molecular Cloning, A Laboratory Manual) of restriction-digested plant genomic DNA may be probed with the AZ nucleic acids. The resulting banding patterns may then be subjected to genetic analyses using computer programs such as MapMaker (Lander et al. (1987) Genomics 1: 174-181) in order to construct a genetic map. In addition, the nucleic acids may be used to probe Southern blots containing restriction endonuclease-treated genomic DNAs of a set of individuals representing parent and progeny of a defined genetic cross. Segregation of the DNA polymorphisms is noted and used to calculate the position of the AZ nucleic acid in the genetic map previously obtained using this population (Botstein et al. (1980) Am. J. Hum. Genet. 32: 314-331).

[0259] The production and use of plant gene-derived probes for use in genetic mapping is described in Bernatzky and Tanksley (1986) Plant Mol. Biol. Reporter 4: 37-41. Numerous publications describe genetic mapping of specific cDNA clones using the methodology outlined above or variations thereof. For example, F2 intercross populations, backcross populations, randomly mated populations, near isogenic lines, and other sets of individuals may be used for mapping. Such methodologies are well known to those skilled in the art.

[0260] The nucleic acid probes may also be used for physical mapping (i.e., placement of sequences on physical maps; see Hoheisel et al. In: Non-mammalian Genomic Analysis: A Practical Guide, Academic press 1996, pp. 319-346, and references cited therein).

[0261] In another embodiment, the nucleic acid probes may be used in direct fluorescence in situ hybridization (FISH) mapping (Trask (1991) Trends Genet. 7:149-154). Although current methods of FISH mapping favour use of large clones (several kb to several hundred kb; see Laan et al. (1995) Genome Res. 5:13-20), improvements in sensitivity may allow performance of FISH mapping using shorter probes.

[0262] A variety of nucleic acid amplification-based methods for genetic and physical mapping may be carried out using the nucleic acids. Examples include allele-specific amplification (Kazazian (1989) J. Lab. Clin. Med 11:95-96), polymorphism of PCR-amplified fragments (CAPS; Sheffield et al. (1993) Genomics 16:325-332), allele-specific ligation (Landegren et al. (1988) Science 241:1077-1080), nucleotide extension reactions (Sokolov (1990) Nucleic Acid Res. 18:3671), Radiation Hybrid Mapping (Walter et al. (1997) Nat. Genet. 7:22-28) and Happy Mapping (Dear and Cook (1989) Nucleic Acid Res. 17:6795-6807). For these methods, the sequence of a nucleic acid is used to design and produce primer pairs for use in the amplification reaction or in primer extension reactions. The design of such primers is well known to those skilled in the art. In methods employing PCR-based genetic mapping, it may be necessary to identify DNA sequence differences between the parents of the mapping cross in the region corresponding to the instant nucleic acid sequence. This, however, is generally not necessary for mapping methods.

[0263] The methods according to the present invention result in plants having increased yield, as described hereinbefore. These advantageous growth characteristics may also be combined with other economically advantageous traits, such as further yield-enhancing traits, tolerance to various stresses, traits modifying various architectural features and/or biochemical and/or physiological features.

### Detailed Description for the SYT Polypeptide

[0264] Surprisingly, it has now been found that modulating expression of a nucleic acid sequence encoding a SYT polypeptide increases plant yield and/or early vigour under abiotic stress relative to control plants. Therefore, according to the present invention, there is provided a method for increasing plant yield and/or early vigour under abiotic stress relative to control plants, comprising modulating expression in a plant of a nucleic acid sequence encoding a SYT polypeptide.

[0265] Reference herein to “control plants” is taken to mean any suitable control plant or plants.

[0266] The “reference”, “control”, or “wild type” are used herein interchangeably and is preferably a subject, e.g. an organelle, a cell, a tissue, a plant, which is as similar to the subject matter of the invention as possible. The reference, control or wild type is in its genome, transcriptome, proteome or metabolome as similar as possible to the subject of the present invention. Preferably, the term “reference-” “control-” or “wild type-”-organelle, -cell, -tissue or plant, relates to an organelle, cell, tissue or plant, which is nearly genetically identical to the organelle, cell, tissue or plant, of the present invention or to a part thereof, having in increasing order of preference 95%, 98%, 99.00%, 99.10%, 99.30%, 99.50%, 99.70%, 99.90%, 99.99%, 99.999% or more genetic identity to the organelle, cell, tissue or plant, of the present invention. Most preferable the “reference”, “control”, or “wild type” is preferably a subject, e.g. an organelle, a cell, a tissue, a plant, which is genetically identical to the plant, tissue, cell, organelle used according to the method of the invention except that the nucleic acid sequences or the gene product in question is changed, modulated or modified according to the inventive method.

[0267] Preferably, any comparison between the control plants and the plants produced by the method of the invention is carried out under analogous conditions. The term “analogous conditions” means that all conditions such as culture or growing conditions, assay conditions (such as buffer composition, temperature, substrates, pathogen strain, concentrations and the like) are kept identical between the experiments to be compared.

[0268] Any reference hereinafter to a “protein useful in the methods of the invention” is taken to mean a SYT polypeptide as defined herein. Any reference hereinafter to a “nucleic acid useful in the methods of the invention” is taken to mean a nucleic acid capable of encoding such a SYT polypeptide. The nucleic acid to be introduced into a plant (and therefore useful in performing the methods of the invention) is any nucleic acid encoding the type of protein which will now be described, hereafter also named “SYT nucleic acid” or “SYT gene”.

[0269] The term “sequence” relates to polynucleotides, nucleic acids, nucleic acid molecules, peptides, polypeptides and proteins, depending on the context in which the term “sequence” is used. A “coding sequence” is a nucleic acid sequence, which is transcribed into mRNA and/or translated into a polypeptide when placed under the control of appropriate regulatory sequences. The boundaries of the coding sequence are determined by a translation start codon at the 5′-terminus and a translation stop codon at the 3′-terminus. A coding sequence can include, but is not limited to mRNA, cDNA, recombinant nucleic acid sequences or genomic DNA, while introns may be present as well under certain circumstances. The term “expression” or “gene expression” is as defined above. The term “modulation” is defined above and means in relation to expression or gene expression, an increase in expression.

[0270] The term “SYT polypeptide” as defined herein refers to a polypeptide comprising from N-terminal to C-terminal: (i) an SNH domain having in increasing order of preference at least 20%, 25%, 30%, 35%, 40%, 45%, 50%, 55%, 60%, 65%, 70%, 75%, 80%, 85%, 90%, 91%, 92%, 93%, 94%, 95%, 96%, 97%, 98%, 99% sequence identity to the SNH domain of SEQ ID NO: 58; and (ii) a Met-rich domain; and (iii) a QG-rich domain. Preferably, the SNH domain comprises the residues shown in black in FIG. 6. Further preferably, the SNH domain is as represented by SEQ ID NO: 57.

[0271] Additionally, the SYT polypeptide may comprise one or more of the following: (a) SEQ ID NO: 146; (b) SEQ ID NO: 147; and (c) a Met-rich domain at the N-terminal preceding the SNH domain.

[0272] A SYT polypeptide is encoded by a SYT nucleic acid sequence. Therefore the term “SYT nucleic acid sequence” as defined herein is any nucleic acid sequence encoding a SYT polypeptide as defined hereinabove.

[0273] The terms “motif” and “domain” are defined in the definitions section. Specialist databases exist for the identification of domains, for example, SMART (Schultz et al. (1998) Proc. Natl. Acad. Sci. USA 95, 5857-5864; Letunic et al. (2002) Nucleic Acids Res 30, 242-244), InterPro (Mulder et al., (2003) Nucl. Acids. Res. 31, 315-318), Prosite (Bucher and Bairoch (1994), A generalized profile syntax for biomolecular sequences motifs and its function in automatic sequence interpretation. (In) ISMB-94; Proceedings 2nd International Conference on Intelligent Systems for Molecular Biology. Altman R., Brutlag D., Karp P., Lathrop R., Searls D., Eds., pp 53-61, AAAI Press, Menlo Park; Hulo et al., Nucl. Acids. Res. 32:D134-D137, (2004)), or Pfam (Bateman et al., Nucleic Acids Research 30(1): 276-280 (2002)). A set of tools for in silico analysis of protein sequences is available on the ExPASy proteomics server (Swiss Institute of Bioinformatics (Gasteiger et al., ExPASy: the proteomics server for in-depth protein knowledge and analysis, Nucleic Acids Res. 31:3784-3788 (2003)). Domains or motifs may also be identified using routine techniques, such as by sequence alignment.

[0274] SYT polypeptides may readily be identified using routine techniques well known in the art, such as by sequence alignment. Methods for the alignment of sequences for comparison are well known in the art, such methods include GAP, BESTFIT, BLAST, FASTA and TFASTA. GAP uses the algorithm of Needleman and Wunsch ((1970) J Mol Biol 48: 443-453) to find the alignment of two complete sequences that maximizes the number of matches and minimizes the number of gaps. The BLAST algorithm (Basic Local Alignment Search Tool; Altschul et al. (1990) J Mol Biol 215: 403-10) calculates percent sequence identity (%) and performs a statistical analysis of the similarity between the two sequences (E-value).

[0275] Percentage identity refers to the number of identical nucleotides (or amino acids) between the two compared nucleic acid (or polypeptide) sequences over a particular length. The higher the similarity between two sequences, the lower the E-value (or in other words the lower the chance that the hit was found by chance). Computation of the E-value is well known in the art. The software for performing BLAST analysis is publicly available through the National Centre for Biotechnology Information. SYT polypeptides comprising an SNH domain having in increasing order of preference at least 20%, 25%, 30%, 35%, 40%, 45%, 50%, 55%, 60%, 65%, 70%, 75%, 80%, 85%, 90%, 91%, 92%, 93%, 94%, 95%, 96%, 97%, 98%, 99% sequence identity to the SNH domain of SEQ ID NO: 58 may be identified this way. Alternatively, SYT polypeptides useful in the methods of the present invention have, in increasing order of preference, at least 30%, 35%, 40%, 45%, 50%, 55%, 60%, 65%, 70%, 75%, 80%, 85%, 90%, 95%, 96%, 97%, 98% or 99% sequence identity to the polypeptide of SEQ ID NO: 60. Minor manual editing may be performed to optimise alignment between conserved motifs, as would be apparent to a person skilled in the art. In some instances, default parameters may be adjusted to modify the stringency of the search. For example using BLAST, the statistical significance threshold (called “expect” value) for reporting matches against database sequences may be increased to show less stringent matches. In this way, short nearly exact matches may be identified. The presence of SEQ ID NO: 146 and of SEQ ID NO: 147 both comprised in the SYT polypeptides useful in the methods of the invention may be identified this way.

[0276] Furthermore, the presence of a Met-rich domain or a QG-rich domain may also readily be identified. As shown in FIG. 7, the Met-rich domain and QG-rich domain follows the SNH domain. The QG-rich domain may be taken to be substantially the C-terminal remainder of the polypeptide (minus the SHN domain); the Met-rich domain is typically comprised within the first half of the QG-rich (from the N-term to the C-term). Primary amino acid composition (in %) to determine if a polypeptide domain is rich in specific amino acids may be calculated using software programs from the ExPASy server (Gasteiger E et al. (2003) ExPASy: the proteomics server for in-depth protein knowledge and analysis. Nucleic Acids Res 31:3784-3788), in particular the ProtParam tool. The composition of the polypeptide of interest may then be compared to the average amino acid composition (in %) in the Swiss-Prot Protein Sequence data bank (Table 5). Within this databank, the average Met (M) content is of 2.37%, the average Gln (Q) content is of 3.93% and the average Gly (G) content is of 6.93% (Table 5). As defined herein, a Met-rich domain or a QG-rich domain has Met content (in %) or a Gln and Gly content (in %) above the average amino acid composition (in %) in the Swiss-Prot Protein Sequence data bank. For example in SEQ ID NO: 60, the Met-rich domain at the N-terminal preceding the SNH domain (from amino acid positions 1 to 24) has Met content of 20.8% and a QG-rich domain (from amino acid positions 71 to 200) has a Gln (Q) content of 18.6% and a Gly (G) content of 21.4%. Preferably, the Met domain as defined herein has a Met content (in %) that is at least 1.25, 1.5, 1.75, 2.0, 2.25, 2.5, 2.75, 3.0, 3.25, 3.5, 3.75, 4.0, 4.25, 4.5, 4.75, 5.0, 5.25, 5.0, 5.75, 6.0, 6.25, 6.5, 6.75, 7.0, 7.25, 7.5, 7.75, 8.0, 8.25, 8.5, 8.75, 9.0, 9.25, 9.5, 9.75, 10 or more as the average amino acid composition (in %) of said kind of protein sequences, which are included in the Swiss-Prot Protein Sequence data bank. Preferably, the QG-rich domain as defined herein has a Gln (Q) content and/or a Gly (G) content that is at least 1.25, 1.5, 1.75, 2.0, 2.25, 2.5, 2.75, 3.0, 3.25, 3.5, 3.75, 4.0, 4.25, 4.5, 4.75, 5.0, 5.25, 5.0, 5.75, 6.0, 6.25, 6.5, 6.75, 7.0, 7.25, 7.5, 7.75, 8.0, 8.25, 8.5, 8.75, 9.0, 9.25, 9.5, 9.75, 10 or more as much as the average amino acid composition (in %) of said kind of protein sequences, which are included in the Swiss-Prot Protein Sequence data bank.

TABLE 5
Mean amino acid composition (%) of proteins in SWISS PROT
Protein Sequence data bank (July 2004):

| Residue | % |
|---|---|
| A = Ala | 7.80 |
| C = Cys | 1.57 |
| D = Asp | 5.30 |
| E = Glu | 6.59 |
| F = Phe | 4.02 |
| G = Gly | 6.93 |
| H = His | 2.27 |
| I = Ile | 5.91 |
| K = Lys | 5.93 |
| L = Leu | 9.62 |
| M = Met | 2.37 |
| N = Asn | 4.22 |
| P = Pro | 4.85 |
| Q = Gln | 3.93 |
| R = Arg | 5.29 |
| S = Ser | 6.89 |
| T = Thr | 5.46 |
| V = Val | 6.69 |
| W = Trp | 1.16 |
| Y = Tyr | 3.09 |

[0277] Examples of SYT polypeptides include (encoded by polynucleotide sequence accession number in parenthesis; see also Table 6 and mentioned in the sequence protocol): Arabidopsis thaliana Arath_SYT1 (AY102639.1) SEQ ID NO: 60, Arabidopsis thaliana Arath_SYT2 (AY102640.1) SEQ ID NO: 62, Arabidopsis thaliana Arath_SYT3 (AY102641.1) SEQ ID NO: 64, Aspergillus officinalis Aspof_SYT (CV287542) SEQ ID NO: 66, Brassica napus Brana_SYT (CD823592) SEQ ID NO: 68, Citrus sinensis Citsi_SYT (CB290588) SEQ ID NO: 70, Gossypium arboreum Gosar_SYT (BM359324) SEQ ID NO: 72, Medicago trunculata Medtr_SYT (CA858507.1) SEQ ID NO: 74, Oryza sativa Orysa_SYT1 (AK058575) SEQ ID NO: 76, Oryza sativa Orysa_SYT2 (AK105366) SEQ ID NO: 78, Oryza sativa Orysa_SYT3 (BP185008) SEQ ID NO: 80, Solanum tuberosum Soltu_SYT (BG590990) SEQ ID NO: 82, Zea mays Zeama_SYT1 (BG874129.1, CA409022.1) SEQ ID NO: 84, Zea mays Zeama_SYT2 (AY106697) SEQ ID NO: 86, Homo sapiens Homsa_SYT (CAG46900) SEQ ID NO: 88, Allium cepa Allce_SYT2 (CF437485) SEQ ID NO: 90, Aquilegia formosa×Aquilegia pubescens Aqufo_SYT1 (DT758802) SEQ ID NO: 92, Brachypodium distachyon Bradi_SYT3 (DV480064) SEQ ID NO: 94, Brassica napus Brana_SYT2 (CN732814) SEQ ID NO: 96, Citrus sinensis Citsi_SYT2 (CV717501) SEQ ID NO: 98, Euphorbia esula Eupes_SYT2 (DV144834) SEQ ID NO: 100, Glycine max Glyma_SYT2 (BQ612648) SEQ ID NO: 102, Glycine soya Glyso_SYT2 (CA799921) SEQ ID NO: 104, Gossypium hirsutum Goshi_SYT1 (DT558852) SEQ ID NO: 106, Gossypium hirsutum Goshi_SYT2 (DT563805) SEQ ID NO: 108, Hordeum vulgare Horvu_SYT2 (CA032350) SEQ ID NO: 110, Lactuca serriola Lacse_SYT2 (DW110765) SEQ ID NO: 112, Lycopersicon esculentum Lyces_SYT1 (AW934450, BP893155) SEQ ID NO: 114, Malus domestica Maldo_SYT2 (CV084230, DR997566) SEQ ID NO: 116, Medicago trunculata Medtr_SYT2 (CA858743, B1310799, AL382135) SEQ ID NO: 118, Panicum virgatum Panvi_SYT3 (DN152517) SEQ ID NO: 120, Picea sitchensis Picsi_SYT1 (DR484100, DR478464) SEQ ID NO: 122, Pinus taeda Pinta_SYT1 (DT625916) SEQ ID NO: 124, Populus tremula Poptr_SYT1 (DT476906) SEQ ID NO: 126, Saccharum officinarum Sacof_SYT1 (CA078249, CA078630, CA082679, CA234526, CA239244, CA083312) SEQ ID NO: 128, Saccharum officinarum. Sacof_SYT2 (CA110367) SEQ ID NO: 130, Saccharum officinarum Sacof_SYT3 (CA161933, CA265085) SEQ ID NO: 132, Solanum tuberosum Soltu_SYT1 (CK265597) SEQ ID NO: 134, Sorghum bicolor Sorbi_SYT3 (CX611128) SEQ ID NO: 136, Triticum aestivum Triae_SYT2 (CD901951) SEQ ID NO: 138, Triticum aestivum Triae_SYT3 (BJ246754, BJ252709) SEQ ID NO: 140, Vitis vinifera Vitvi_SYT1 (DV219834) SEQ ID NO: 142, Zea mays Zeama_SYT3 (C0468901) SEQ ID NO: 144, Brassica napus Brana_SYT SEQ ID NO: 151, Glycine max Glyma_SYT SEQ ID NO: 153.

TABLE 6
Examples of nucleic acid sequences encoding SYT polypeptides

| | NCBI | | | |
|---|---|---|---|---|
| | nucleotide | Nucleic acid | Translated | |
| | accession | sequence | polypeptide | |
| Name | number | SEQ ID NO | SEQ ID NO | Source |
| Arath_SYT1 | AY102639.1 | 59 | 60 | Arabidopsis thaliana |
| Arath_SYT2 | AY102640.1 | 61 | 62 | Arabidopsis thaliana |
| Arath_SYT3 | AY102641.1 | 63 | 64 | Arabidopsis thaliana |
| Aspof_SYT1 | CV287542 | 65 | 66 | Aspergillus officinalis |
| Brana_SYT1 | CD823592 | 67 | 68 | Brassica napus |
| Citsi_SYT1 | CB290588 | 69 | 70 | Citrus sinensis |
| Gosar_SYT1 | BM359324 | 71 | 72 | Gossypium arboreum |
| Medtr_SYT1 | CA858507.1 | 73 | 74 | Medicago trunculata |
| Orysa_SYT1 | AK058575 | 75 | 76 | Oryza sativa |
| Orysa_SYT2 | AK105366 | 77 | 78 | Oryza sativa |
| Orysa_SYT3 | BP185008 | 79 | 80 | Oryza sativa |
| Soltu_SYT2 | BG590990 | 81 | 82 | Solanum tuberosum |
| Zeama_SYT1 | BG874129.1 | 83 | 84 | Zea mays |
| | CA409022.1* | | | |
| Zeama_SYT2 | AY106697 | 85 | 86 | Zea mays |
| Homsa_SYT | CR542103 | 87 | 88 | Homo sapiens |
| Allce_SYT2 | CF437485 | 89 | 90 | Allium cepa |
| Aqufo_SYT1 | DT758802.1 | 91 | 92 | Aquilegia formosa x |
| | | | | Aquilegia pubescens |
| Bradi_SYT3 | DV480064.1 | 93 | 94 | Brachypodium distachyon |
| Brana_SYT2 | CN732814 | 95 | 96 | Brassica napa |
| Citsi_SYT2 | CV717501 | 97 | 98 | Citrus sinensis |
| Eupes_SYT2 | DV144834 | 99 | 100 | Euphorbia esula |
| Glyma_SYT2 | BQ612648 | 101 | 102 | Glycine max |
| Glyso_SYT2 | CA799921 | 103 | 104 | Glycine soya |
| Goshi_SYT1 | DT558852 | 105 | 106 | Gossypium hirsutum |
| Goshi_SYT2 | DT563805 | 107 | 108 | Gossypium hirsutum |
| Horvu_SYT2 | CA032350 | 109 | 110 | Hordeum vulgare |
| Lacse_SYT2 | DW110765 | 111 | 112 | Lactuca serriola |
| Lyces_SYT1 | AW934450.1 | 113 | 114 | Lycopersicon esculentum |
| | BP893155.1* | | | |
| Maldo_SYT2 | CV084230 | 115 | 116 | Malus domestica |
| | DR997566* | | | |
| Medtr_SYT2 | CA858743 | 117 | 118 | Medicago trunculata |
| | BI310799.1 | | | |
| | AL382135.1* | | | |
| Panvi_SYT3 | DN152517 | 119 | 120 | Panicum virgatum |
| Picsi_SYT1 | DR484100 | 121 | 122 | Picea sitchensis |
| | DR478464.1 | | | |
| Pinta_SYT1 | DT625916 | 123 | 124 | Pinus taeda |
| Poptr_SYT1 | DT476906 | 125 | 126 | Populus tremula |
| Sacof_SYT1 | CA078249.1 | 127 | 128 | Saccharum officinarum |
| | CA078630 | | | |
| | CA082679 | | | |
| | CA234526 | | | |
| | CA239244 | | | |
| | CA083312* | | | |
| Sacof_SYT2 | CA110367 | 129 | 130 | Saccharum officinarum |
| Sacof_SYT3 | CA161933.1 | 131 | 132 | Saccharum officinarum |
| | CA265085* | | | |
| Soltu_SYT1 | CK265597 | 133 | 134 | Solanum tuberosum |
| Sorbi_SYT3 | CX611128 | 135 | 136 | Sorghum bicolor |
| Triae_SYT2 | CD901951 | 137 | 138 | Triticum aestivum |
| Triae_SYT3 | BJ246754 | 139 | 140 | Triticum aestivum |
| | BJ252709* | | | |
| Vitvi_SYT1 | DV219834 | 141 | 142 | Vitis vinifera |
| Zeama_SYT3 | CO468901 | 143 | 144 | Zea mays |
| Brana_SYT | NA | 150 | 151 | Brassica napus |
| Glyma_SYT | NA | 152 | 153 | Glycine max |

*Compiled from cited accessions
NA: not available (proprietary)

[0278] Examples of nucleic acids encoding SYT polypeptides are given in Table 6 above. Such nucleic acids are useful in performing the methods of the invention. The amino acid sequences given in Table 6 above are example sequences of orthologues and paralogues of the SYT polypeptide represented by SEQ ID NO: 58, the terms “orthologues” and “paralogues” being as defined herein. Further orthologues and paralogues may readily be identified by performing a so-called reciprocal blast search. Typically, this involves a first BLAST involving BLASTing a query sequence (for example using any of the sequences listed in Table 6 above) against any sequence database, such as the publicly available NCBI database. BLASTN or TBLASTX (using standard default values) are generally used when starting from a nucleotide sequence, and BLASTP or TBLASTN (using standard default values) when starting from a protein sequence. The BLAST results may optionally be filtered. The full-length sequences of either the filtered results or non-filtered results are then BLASTed back (second BLAST) against sequences from the organism from which the query sequence is derived (where the query sequence is SEQ ID NO: 59 or SEQ ID NO: 60, the second BLAST would therefore be against Arabidopsis sequences). The results of the first and second BLASTs are then compared. A paralogue is identified if a high-ranking hit from the first blast is from the same species as from which the query sequence is derived, a BLAST back then ideally results in the query sequence amongst the highest hits; an orthologue is identified if a high-ranking hit in the first BLAST is not from the same species as from which the query sequence is derived, and preferably results upon BLAST back in the query sequence being among the highest hits.

[0279] High-ranking hits are those having a low E-value. The lower the E-value, the more significant the score (or in other words the lower the chance that the hit was found by chance). Computation of the E-value is well known in the art. In addition to E-values, comparisons are also scored by percentage identity. Percentage identity refers to the number of identical nucleotides (or amino acids) between the two compared nucleic acid (or polypeptide) sequences over a particular length. In the case of large families, ClustalW may be used, followed by a neighbour joining tree, to help visualize clustering of related genes and to identify orthologues and paralogues.

[0280] It is to be understood that sequences falling under the definition of a “SYT polypeptide” are not to be limited to the polypeptides given in Table 6 (and mentioned in the sequence protocol), but that any polypeptide comprising from N-terminal to C-terminal: (i) an SNH domain having at least 20%, 25%, 30%, 35%, 40%, 45%, 50%, 55%, 60%, 65%, 70%, 75%, 80%, 85%, 90%, 91%, 92%, 93%, 94%, 95%, 96%, 97%, 98%, 99% sequence identity to the SNH domain of SEQ ID NO: 58; and (ii) a Met-rich domain; and (iii) a QG-rich domain may be suitable in performing the methods of the invention. Preferably, the SNH domain comprises the residues shown in black in FIG. 6. Additionally, the SYT polypeptide may comprise one or more of the following: (a) SEQ ID NO: 146; (b) SEQ ID NO: 147; and (c) a Met-rich domain at the N-terminal preceding the SNH domain. Most preferably, the SYT polypeptide is as represented by SEQ ID NO: 60, SEQ ID NO: 151 or SEQ ID NO: 153.

[0281] A SYT polypeptide typically interacts with GRF (growth-regulating factor) polypeptides in yeast two-hybrid systems. Yeast two-hybrid interaction assays are well known in the art (see Field et al. (1989) Nature 340(6230): 245-246). For example, the SYT polypeptide as represented by SEQ ID NO: 4 is capable of interacting with AtGRF5 and with AtGRF9.

[0282] In a further embodiment the invention provides an isolated nucleic acid sequence comprising a nucleic acid sequence selected from the group consisting of:
[0283] (a) an isolated nucleic acid sequence as depicted in SEQ ID NO: 150 and SEQ ID NO: 152;
[0284] (b) an isolated nucleic acid sequence encoding the polypeptide as depicted in SEQ ID NO: 151 and SEQ ID NO: 153;
[0285] (c) an isolated nucleic acid sequence whose sequence can be deduced from a polypeptide as depicted in SEQ ID NO: 151 and SEQ ID NO: 153 as a result of the degeneracy of the genetic code;
[0286] (d) an isolated nucleic acid sequence which encodes a polypeptide which has at least 70% identity with the polypeptide encoded by the nucleic acid sequence of (a) to (c);
[0287] (e) an isolated nucleic acid sequence encoding a homologue, derivative or active fragment of the polypeptide as depicted in SEQ ID NO: 151 and SEQ ID NO: 153, which homologue, derivative or fragment is of plant origin and comprises advantageously from N-terminal to C-terminal:
   [0288] (i) an SNH domain having in increasing order of preference at least 20%, 25%, 30%, 35%, 40%, 45%, 50%, 55%, 60%, 65%, 70%, 75%, 80%, 85%, 90%, 91%, 92%, 93%, 94%, 95%, 96%, 97%, 98%, 99% sequence identity to the SNH domain of SEQ ID NO: 58;
   [0289] (ii) a Met-rich domain;
   [0290] (iii) a QG-rich domain;
[0291] (f) an isolated nucleic acid sequence capable of hybridising with a nucleic acid of (a) to (c) above, or its complement, wherein the hybridising sequence or the complement thereof encodes the plant protein of (a) to (e);
   whereby modified expression of the nucleic acid sequence increases yield and/or early vigour in plants under abiotic stress compared to control plants.

[0292] The nucleic acid sequences encoding SYT polypeptides as given in Table 6, or orthologues or paralogues of any of the aforementioned SEQ ID NOs need not be full-length nucleic acid sequences, since performance of the methods of the invention does not rely on the use of full-length nucleic acid sequences.

[0293] SYT nucleic acid variants may also be suitable in practising the methods of the invention. Variant SYT nucleic acid sequences typically are those having the same function as a naturally occurring SYT nucleic acid sequence, which can be the same biological function or the function of increasing yield and/or early vigour when expression of the nucleic acid sequence is modulated in a plant under abiotic stress relative to control plants. Such variants include portions of a SYT nucleic acid sequence, splice variants of a SYT nucleic acid sequence, allelic variants of a SYT nucleic acid sequence, variants of a SYT nucleic acid sequence obtained by gene shuffling and/or nucleic acid sequences capable of hybridising with a SYT nucleic acid sequence as defined below. Preferably, the nucleic acid variant is a variant of a nucleic acid sequence is as represented by SEQ ID NO: 59, SEQ ID NO: 150 or SEQ ID NO: 152. The terms hybridising sequence, splice variant, allelic variant and gene shuffling are as described herein.

[0294] Nucleic acids encoding SYT polypeptides need not be full-length nucleic acids, since performance of the methods of the invention does not rely on the use of full-length nucleic acid sequences. According to the present invention, there is provided a method for enhancing yield and/or early vigour in plants under abiotic stress, comprising introducing and expressing in a plant a portion of any one of the nucleic acid sequences given in Table 6, or a portion of a nucleic acid encoding an orthologue, paralogue or homologue of any of the amino acid sequences given in Table 6.

[0295] The term portion as used herein refers to a piece of DNA encoding a polypeptide comprising from N-terminal to C-terminal: (i) an SNH domain having in increasing order of preference at least 20%, 25%, 30%, 35%, 40%, 45%, 50%, 55%, 60%, 65%, 70%, 75%, 80%, 85%, 90%, 91%, 92%, 93%, 94%, 95%, 96%, 97%, 98%, 99% sequence identity to the SNH domain of SEQ ID NO: 58 and (ii) a Met-rich domain; and (iii) a QG-rich domain. A portion may be prepared, for example, by making one or more deletions to a SYT nucleic acid sequence. The portions may be used in isolated form or they may be fused to other coding (or non coding) sequences in order to, for example, produce a polypeptide that combines several activities. When fused to other coding sequences, the resulting polypeptide produced upon translation may be bigger than that predicted for the SYT fragment. Preferably, the portion is a portion of a nucleic acid sequence as represented by any one given in Table 6, or orthologues or paralogues of any of the aforementioned SEQ ID NOs. Most preferably the portion is a portion of a nucleic acid sequence is as represented by SEQ ID NO: 59, SEQ ID NO: 150 or SEQ ID NO: 152.

[0296] Another variant of a SYT nucleic acid sequence is a nucleic acid sequence capable of hybridising under reduced stringency conditions, preferably under stringent conditions, with a SYT nucleic acid sequence as hereinbefore defined, which hybridising sequence encodes a SYT polypeptide or a portion as defined hereinabove.

[0297] According to the present invention, there is provided a method for enhancing yield and/or early vigour in plants under abiotic stress, comprising introducing and expressing in a plant a nucleic acid capable of hybridizing to any one of the nucleic acids given in Table 6, or comprising introducing and expressing in a plant a nucleic acid capable of hybridising to a nucleic acid encoding an orthologue, paralogue or homologue of any of the nucleic acid sequences given in Table 6.

[0298] Hybridising sequences useful in the methods of the invention encode a SYT polypeptide comprising from N-terminal to C-terminal: (i) an SNH domain having in increasing order of preference at least 20%, 25%, 30%, 35%, 40%, 45%, 50%, 55%, 60%, 65%, 70%, 75%, 80%, 85%, 90%, 91%, 92%, 93%, 94%, 95%, 96%, 97%, 98%, 99% sequence identity to the SNH domain of SEQ ID NO: 58 and (ii) a Met-rich domain; and (iii) a QG-rich domain. Preferably, the hybridising sequence is one that is capable of hybridising to a nucleic acid sequence as given in Table 6, or orthologues or paralogues of any of the aforementioned SEQ ID NOs, or to a portion of any of the aforementioned sequences as defined hereinabove. Most preferably the hybridizing sequence is one that is capable of hybridising to a nucleic acid sequence is as represented by SEQ ID NO: 59, SEQ ID NO: 150, SEQ ID NO: 152, or to portions (or probes) thereof. Methods for designing probes are well known in the art. Probes are generally less than 1000 bp in length, preferably less than 500 bp in length. Commonly, probe lengths for DNA-DNA hybridisations such as Southern blotting, vary between 100 and 500 bp, whereas the hybridising region in probes for DNA-DNA hybridisations such as in PCR amplification generally are shorter than 50 but longer than 10 nucleotides. The hybridising sequence is typically at least 100, 125, 150, 175, 200 or 225 nucleotides in length, preferably at least 250, 275, 300, 325, 350, 375, 400, 425, 450 or 475 nucleotides in length, further preferably least 500, 525, 550, 575, 600, 625, 650, 675, 700 or 725 nucleotides in length, or as long as a full length SYT cDNA.

[0299] Another nucleic acid variant useful in the methods of the invention is a splice variant encoding a SYT polypeptide as defined hereinabove. Preferred splice variants are splice variants of the SYT nucleic acid sequences as given in Table 6, or orthologues or paralogues of any of the aforementioned SEQ ID NOs. Most preferred is a splice variant of a SYT nucleic acid sequence as represented by SEQ ID NO: 59, SEQ ID NO: 150 or SEQ ID NO: 152.

[0300] According to the present invention, there is provided a method for enhancing yield and/or early vigour in plants under abiotic stress, comprising introducing and expressing in a plant a splice variant of any one of the nucleic acid sequences given in Table 6, or a splice variant of a nucleic acid encoding an orthologue, paralogue or homologue of any of the amino acid sequences given in Table 6.

[0301] Another nucleic acid variant useful in performing the methods of the invention is an allelic variant of a nucleic acid encoding a SYT polypeptide as defined hereinabove. Allelic variants exist in nature, and encompassed within the methods of the present invention is the use of these natural alleles. Preferred allelic variants are allelic variants of the SYT nucleic acid sequences as given in Table 6, or orthologues or paralogues of any of the aforementioned SEQ ID NOs. Most preferred is a splice variant of a SYT nucleic acid sequence as represented by SEQ ID NO: 59.

[0302] According to the present invention, there is provided a method for enhancing yield and/or early vigour in plants under abiotic stress, comprising introducing and expressing in a plant an allelic variant of any one of the nucleic acids given in Table 6, or comprising introducing and expressing in a plant an allelic variant of a nucleic acid encoding an orthologue, paralogue or homologue of any of the amino acid sequences given in Table 6.

[0303] A further nucleic acid variant useful in the methods of the invention is a nucleic acid variant encoding a SYT polypeptide obtained by gene shuffling (or directed evolution).

[0304] Another nucleic acid variant useful in the methods of the invention is a nucleic acid variant encoding a SYT polypeptide obtained by site-directed mutagenesis. Site-directed mutagenesis may be used to generate variants of SYT nucleic acid sequences. Several methods are available to achieve site-directed mutagenesis, the most common being PCR based methods (Current Protocols in Molecular Biology. Wiley Eds).

[0305] According to the present invention, there is provided a method for enhancing yield and/or early vigour in plants under abiotic stress, comprising introducing and expressing in a plant a variant of any one of the nucleic acid sequences given in Table 6, or comprising introducing and expressing in a plant a variant of a nucleic acid encoding an orthologue, paralogue or homologue of any of the amino acid sequences given in Table 6, which variant nucleic acid is obtained by gene shuffling or site-directed mutagenesis.

[0306] The following SYT nucleic acid variants are examples of variants suitable in practising the methods of the invention:
[0307] (i) a portion of a SYT nucleic acid sequence;
[0308] (ii) a nucleic acid sequence capable of hybridising with a SYT nucleic acid sequence;
[0309] (iii) a splice variant of a SYT nucleic acid sequence;
[0310] (iv) an allelic variant of a SYT nucleic acid sequence;
[0311] (v) a SYT nucleic acid sequence obtained by gene shuffling;
[0312] (vi) a SYT nucleic acid sequence obtained by site-directed mutagenesis.

[0313] Also useful in the methods of the invention are nucleic acids encoding homologues of SYT polypeptides as given in Table 6, or orthologues or paralogues of any of the aforementioned SEQ ID NOs.

[0314] Also useful in the methods of the invention are nucleic acids encoding derivatives of any one of the SYT nucleic acid sequences as given in Table 6, or orthologues or paralogues of any of the aforementioned SEQ ID NOs. Derivatives of orthologues or paralogues of any of the aforementioned SEQ ID NOs are further examples that may be suitable for use in the methods of the invention.

[0315] SYT nucleic acid sequences may be derived from any artificial source or natural source, such as plants, algae, fungi or animals. The nucleic acid sequence may be modified from its native form in composition and/or genomic environment through deliberate human manipulation. Preferably the nucleic acid sequence encoding a SYT polypeptide is of plant origin. The nucleic acid sequence may be isolated from a dicotyledonous species, preferably from the family Brassicaceae, further preferably from Arabidopsis thaliana or Brassica napus. Alternatively, nucleic acid sequence may be isolated from the family Fabaceae, preferably from Glycine max. More preferably, the SYT nucleic acid sequence isolated from:
[0316] (a) Arabidopsis thaliana is as represented by SEQ ID NO: 59 and the SYT polypeptide as represented by SEQ ID NO: 60;
[0317] (b) Brassica napus is as represented by SEQ ID NO: 150 and the SYT polypeptide as represented by SEQ ID NO: 151;
[0318] (c) Glycine max is as represented by SEQ ID NO: 152 and the SYT polypeptide as represented by SEQ ID NO: 153.

[0319] The terms “yield”, “seed yield” and “early vigour” are defined above. The terms “increased”, “improved”, “enhanced”, “amplified”, “extended”, or “rised” are interchangeable and are defined hereinabove. Taking corn as an example, a yield increase may be manifested as one or more of the following: increase in the number of plants per square meter, an increase in the number of ears per plant, an increase in the number of rows, number of kernels per row, kernel weight, thousand kernel weight, ear length/diameter, increase in the seed filling rate (which is the number of filled seeds divided by the total number of seeds and multiplied by 100), among others. Taking rice as an example, a yield increase may be manifested by an increase in one or more of the following: number of plants per square meter, number of panicles per plant, number of spikelets per panicle, number of flowers (florets) per panicle (which is expressed as a ratio of the number of filled seeds over the number of primary panicles), increase in the seed filling rate (which is the number of filled seeds divided by the total number of seeds and multiplied by 100), increase in thousand kernel weight, among others.

[0320] An increase in yield may also result in modified architecture, or may occur as a result of modified architecture.

[0321] According to a preferred feature, performance of the methods of the invention result in plants having increased biomass, increased seed yield and/or early vigour under abiotic stress relative to control plants. Therefore, according to the present invention, there is provided a method for increasing biomass, seed yield and/or early vigour in a plant under abiotic stress relative to control plants, which method comprises modulating expression in a plant of a nucleic acid sequence encoding a SYT polypeptide. Preferably, by increased biomass is herein taken to mean the aboveground part (or leafy biomass) during plant development and at maturity. Preferably, by increased seed yield is herein taken to mean any one of the following: total seed yield, number of filled seeds, seed fill rate, TKW and harvest index.

[0322] Since the transgenic plants according to the present invention have increased yield under abiotic stress, it is likely that these plants exhibit an increased growth rate under abiotic stress (during at least part of their life cycle, for example at seedling stage for early vigour), relative to the growth rate of control plants at a corresponding stage in their life cycle. The increased growth rate may be specific to one or more parts of a plant (including seeds), or may be throughout substantially the whole plant. The increase in growth rate may take place at one or more stages in the life cycle of a plant or during substantially the whole plant life cycle. Increased growth rate during the early stages in the life cycle of a plant may reflect enhanced vigour. The increase in growth rate may alter the harvest cycle of a plant allowing plants to be sown later and/or harvested sooner than would otherwise be possible. If the growth rate is sufficiently increased, it may allow for the further sowing of seeds of the same plant species (for example sowing and harvesting of rice plants followed by sowing and harvesting of further rice plants all within one conventional growing period). Similarly, if the growth rate is sufficiently increased, it may allow for the further sowing of seeds of different plants species (for example the planting and harvesting of corn plants followed by, for example, the planting and optional harvesting of soybean, potato or any other suitable plant). Harvesting additional times from the same rootstock in the case of some crop plants may also be possible. Altering the harvest cycle of a plant may lead to an increase in annual biomass production per square meter (due to an increase in the number of times (say in a year) that any particular plant may be grown and harvested). An increase in growth rate may also allow for the cultivation of transgenic plants in a wider geographical area than their wild-type counterparts, since the territorial limitations for growing a crop are often determined by adverse environmental conditions either at the time of planting (early season) or at the time of harvesting (late season). Such adverse conditions may be avoided if the harvest cycle is shortened. The growth rate may be determined by deriving various parameters from growth curves, such parameters may be: T-Mid (the time taken for plants to reach 50% of their maximal size) and T-90 (time taken for plants to reach 90% of their maximal size), amongst others. The growth rate of plants is measured under abiotic stress such as salt stress; water stress (drought or excess water); reduced nutrient availability stress; temperature stresses caused by atypical hot or cold/freezing temperatures; oxidative stress; metal stress; chemical toxicity stress; or combinations thereof.

[0323] Performance of the methods of the invention gives plants having an increased growth rate under abiotic stress relative to control plants. Therefore, according to the present invention, there is provided a method for increasing growth rate in plants under abiotic stress relative to control plants, which method comprises modulating expression in a plant of a nucleic acid sequence encoding a SYT polypeptide.

[0324] Plants typically respond to exposure to stress by growing more slowly. In conditions of severe stress, the plant may even stop growing altogether. Mild stress in the sense of the invention leads to a reduction in the growth of the stressed plants of less than 40%, 35% or 30%, preferably less than 25%, 20% or 15%, more preferably less than 14%, 13%, 12%, 11% or 10% or less in comparison to the control plant under non-stress conditions. Due to advances in agricultural practices (irrigation, fertilization, pesticide treatments) severe stresses are not often encountered in cultivated crop plants. As a consequence, the compromised growth induced by mild stress is often an undesirable feature for agriculture. Mild stresses are the typical stresses to which a plant may be exposed. These stresses may be the everyday biotic and/or abiotic (environmental) stresses to which a plant is exposed. Biotic stresses are typically those stresses caused by pathogens, such as bacteria, viruses, fungi, nematodes and insects. Typical abiotic or environmental stresses comprise any one or more of: salt stress, water stress (drought or excess water), reduced nutrient availability stress, temperature stresses caused by atypical hot or cold/freezing temperatures, oxidative stress, metal stress or chemical toxicity stress.

[0325] Performance of the methods according to the present invention results in plants having increased yield and/or early vigour under abiotic stress relative to control plants. As reported in Wang et al., (Planta (2003) 218: 1-14), abiotic stress leads to a series of morphological, physiological, biochemical and molecular changes that adversely affect plant growth and productivity. Drought, salinity, extreme temperatures and oxidative stress are often interconnected and may induce growth and cellular damage through similar mechanisms. For example, drought and/or salinisation are manifested primarily as osmotic stress, resulting in the disruption of homeostasis and ion distribution in the cell. Oxidative stress, which frequently accompanies high or low temperature, salinity or drought stress, may cause denaturation of functional and structural proteins. Reduced nutrient availability, in particular reduced nitrogen availability, is a major limiting factor for plant growth, for example through the reduced availability of amino acids for protein synthesis. As a consequence, these diverse environmental stresses often activate similar cell signaling pathways and cellular responses, such as the production of stress proteins, up-regulation of anti-oxidants, accumulation of compatible solutes and growth arrest.

[0326] Since diverse environmental stresses activate similar pathways, the exemplification of the present invention with salt stress should not be seen as a limitation to salt stress, but more as a screen to indicate the involvement of SYT polypeptides in abiotic stresses in general. A review in TRENDS in Plant Science (Jian-Kang Zhu, Vol. 6, No. 2, February 2001) confirms that transgenic plants performing better under salt stress often also perform better under other stresses including chilling, freezing, heat and drought. A particularly high degree of “cross talk” is reported between drought stress and high-salinity stress (Rabbani et al., Plant Physiology, December 2003, Vol. 133, pp. 1755-1767). Therefore, it would be apparent that a SYT polypeptide (as defined herein) would, along with its usefulness in increasing yield and/or early vigour in plants under salt stress, also find use in increasing yield and/or early vigour of the plant under various other abiotic stresses.

[0327] The term “abiotic stress” as defined herein is taken to mean any one or more of: salt stress, water stress (drought or excess water), reduced nutrient availability stress, temperature stresses caused by atypical hot or cold/freezing temperatures, oxidative stress, metal stress or chemical toxicity stress. The term salt stress is not restricted to common salt (NaCl), but may be any one or more of: NaCl, KCl, LiCl, MgCl₂, CaCl₂, amongst others.

[0328] Performance of the methods of the invention gives plants having increased yield and/or early vigour under abiotic stress relative to control plants. Therefore, according to the present invention, there is provided a method for increasing plant yield and/or early vigour under abiotic stress relative to control plants, which method comprises modulating expression in a plant of a nucleic acid sequence encoding a SYT polypeptide. By abiotic stress is taken to mean any one or more of: salt stress, water stress (drought or excess water), reduced nutrient availability stress, temperature stresses caused by atypical hot or cold/freezing temperatures, oxidative stress, metal stress or chemical toxicity stress.

[0329] The methods of the invention are advantageously applicable to any plant. Plants that are particularly useful in the methods of the invention include all plants which belong to the superfamily Viridiplantae, in particular monocotyledonous and dicotyledonous plants including fodder or forage legumes, ornamental plants, food crops, trees or shrubs. According to a preferred embodiment of the present invention, the plant is a crop plant. Examples of crop plants include soybean, sunflower, canola, alfalfa, rapeseed, cotton, tomato, potato and tobacco. Further preferably, the plant is a monocotyledonous plant. Examples of monocotyledonous plants include sugarcane. More preferably the plant is a cereal. Examples of cereals include rice, maize, wheat, barley, millet, rye, triticale, sorghum and oats.

[0330] A preferred method for introducing a genetic modification is to introduce and express in a plant a nucleic acid sequence encoding a SYT polypeptide. A SYT polypeptide is defined as a polypeptide comprising from N-terminal to C-terminal: (i) an SNH domain having in increasing order of preference at least 20%, 25%, 30%, 35%, 40%, 45%, 50%, 55%, 60%, 65%, 70%, 75%, 80%, 85%, 90%, 91%, 92%, 93%, 94%, 95%, 96%, 97%, 98%, 99% sequence identity to the SNH domain of SEQ ID NO: 58; and (ii) a Met-rich domain; and (iii) a QG-rich domain. Preferably, the SNH domain comprises the residues shown in black in FIG. 6. Further preferably, the SNH domain is represented by SEQ ID NO: 57.

[0331] According to a preferred aspect of the present invention, the modulated expression of a SYT nucleic acid sequence is increased expression. The increase in expression may lead to raised SYT mRNA or polypeptide levels, which could equate to raised activity of the SYT polypeptide; or the activity may also be raised when there is no change in polypeptide levels, or even when there is a reduction in polypeptide levels. This may occur when the intrinsic properties of the SYT polypeptide are altered, for example, by making mutant versions that are more active that the wild type polypeptide. Methods for increasing or reducing expression of genes or gene products are known in the art.

[0332] The invention also provides genetic constructs and vectors to facilitate introduction and/or expression of the nucleotide sequences useful in the methods according to the invention.

[0333] Therefore, there is provided a genetic construct comprising:
[0334] (i) A nucleic acid sequence encoding a SYT polypeptide, as defined hereinabove, or a nucleic acid sequence as represented by SEQ ID NO: 150 or SEQ ID NO: 152;
[0335] (ii) One or more control sequences capable of driving expression of the nucleic acid sequence of (i); and optionally
[0336] (iii) A transcription termination sequence.

[0337] A preferred construct is one where the control sequence is a promoter derived from a plant, preferably from a monocotyledonous plant if a monocotyledonous is to be transformed.

[0338] Constructs useful in the methods according to the present invention may be constructed using recombinant DNA technology well known to persons skilled in the art. The genetic constructs may be inserted into vectors, which may be commercially available, suitable for transforming into plants and suitable for expression of the gene of interest in the transformed cells. The invention therefore provides use of a genetic construct as defined hereinabove in the methods of the invention.

[0339] Plants are transformed with a vector comprising the sequence of interest (i.e., a nucleic acid sequence encoding a SYT polypeptide). The sequence of interest is operably linked to one or more control sequences (at least to a promoter).

[0340] Advantageously, any type of promoter may be used to drive expression of the nucleic acid sequence.

[0341] Useful promoters are constitutive promoters (Benfey et al., EMBO J. 8 (1989) 2195-2202), such as those which originate from plant viruses, such as 35S CAMV (Franck et al., Cell 21 (1980) 285-294), 19S CaMV (see also U.S. Pat. No. 5,352,605 and WO 84/02913), 34S FMV (Sanger et al., Plant. Mol. Biol., 14, 1990: 433-443), the parsley ubiquitin promoter, or plant promoters such as the Rubisco small subunit promoter described in U.S. Pat. No. 4,962,028 or the plant promoters PRP1 [Ward et al., Plant. Mol. Biol. 22 (1993)], SSU, PGEL1, OCS [Leisner (1988) Proc Natl Acad Sci USA 85(5): 2553-2557], lib4, usp, mas [Comai (1990) Plant Mol Biol 15 (3):373-381], STLS1, ScBV (Schenk (1999) Plant Mol Biol 39(6):1221-1230), B33, SAD1 or SAD2 (flax promoters, Jain et al., Crop Science, 39 (6), 1999: 1696-1701) or nos [Shaw et al. (1984) Nucleic Acids Res. 12(20):7831-7846]. Further examples of constitutive plant promoters are the sugarbeet V-ATPase promoters (WO 01/14572). Examples of synthetic constitutive promoters are the Super promoter (WO 95/14098) and promoters derived from G-boxes (WO 94/12015). If appropriate, chemical inducible promoters may furthermore also be used, compare EP-A 388186, EP-A 335528, WO 97/06268. Stable, constitutive expression of the polypeptides according to the invention a plant can be advantageous. However, inducible expression of the polypeptide of the invention is advantageous, if a late expression before the harvest is of advantage, as metabolic manipulation may lead to plant growth retardation.

[0342] The expression of plant genes can also be facilitated via a chemical inducible promoter (for a review, see Gatz 1997, Annu. Rev. Plant Physiol. Plant Mol. Biol., 48:89-108). Chemically inducible promoters are particularly suitable when it is desired to express the gene in a time-specific manner. Examples of such promoters are a salicylic acid inducible promoter (WO 95/19443), and abscisic acid-inducible promoter (EP 335 528), a tetracyclin-inducible promoter (Gatz et al. (1992) Plant J. 2, 397-404), a cyclohexanol- or ethanol-inducible promoter (WO 93/21334) or others as described herein.

[0343] Other suitable promoters are those that react to biotic or abiotic stress, for example the pathogen-induced PRP1 gene promoter (Ward et al., Plant. Mol. Biol. 22 (1993) 361-366), the tomato heat-inducible hsp80 promoter (U.S. Pat. No. 5,187,267), the potato chill-inducible alpha-amylase promoter (WO 96/12814) or the wound-inducible pinII promoter (EP-A-0 375 091) or others as described herein.

[0344] Preferred promoters are in particular those which bring gene expression in tissues and organs, in seed cells, such as endosperm cells and cells of the developing embryo. Suitable promoters are the oilseed rape napin gene promoter (U.S. Pat. No. 5,608,152), the Vicia faba USP promoter (Baeumlein et al., Mol Gen Genet, 1991, 225 (3): 459-67), the Arabidopsis oleosin promoter (WO 98/45461), the Phaseolus vulgaris phaseolin promoter (U.S. Pat. No. 5,504,200), the Brassica Bce4 promoter (WO 91/13980), the bean arc5 promoter, the carrot DcG3 promoter, or the Legumin B4 promoter (LeB4; Baeumlein et al., 1992, Plant Journal, 2 (2): 233-9), and promoters which bring about the seed-specific expression in monocotyledonous plants such as maize, barley, wheat, rye, rice and the like. Advantageous seed-specific promoters are the sucrose binding protein promoter (WO 00/26388), the phaseolin promoter and the napin promoter. Suitable promoters which must be considered are the barley Ipt2 or Ipt1 gene promoter (WO 95/15389 and WO 95/23230), and the promoters described in WO 99/16890 (promoters from the barley hordein gene, the rice glutelin gene, the rice oryzin gene, the rice prolamin gene, the wheat gliadin gene, the wheat glutelin gene, the maize zein gene, the oat glutelin gene, the sorghum kasirin gene and the rye secalin gene). Further suitable promoters are Amy32b, Amy 6-6 and Aleurain [U.S. Pat. No. 5,677,474], Bce4 (oilseed rape) [U.S. Pat. No. 5,530,149], glycinin (soya) [EP 571 741], phosphoenolpyruvate carboxylase (soya) [JP 06/62870], ADR12-2 (soya) [WO 98/08962], isocitrate lyase (oilseed rape) [U.S. Pat. No. 5,689,040] or α-amylase (barley) [EP 781 849]. Other promoters which are available for the expression of genes in plants are leaf-specific promoters such as those described in DE-A 19644478 or light-regulated promoters such as, for example, the pea petE promoter.

[0345] Further suitable plant promoters are the cytosolic FBPase promoter or the potato ST-LSI promoter (Stockhaus et al., EMBO J. 8, 1989, 2445), the Glycine max phosphoribosylpyrophosphate amidotransferase promoter (GenBank Accession No. U87999) or the node-specific promoter described in EP-A-0 249 676.

[0346] In one embodiment, the SYT nucleic acid sequence is operably linked to a constitutive promoter. A constitutive promoter is transcriptionally active during most, but not necessarily all, phases of its growth and development and is substantially ubiquitously expressed. Preferably the promoter is derived from a plant, more preferably the promoter is from a monocotyledonous plant if a monocotyledonous plant is to be transformed. Further preferably, the constitutive promoter is a GOS2 promoter that is represented by a nucleic acid sequence substantially similar to SEQ ID NO: 145 or SEQ ID NO: 56. Most preferably the GOS2 promoter is as represented by SEQ ID NO: 56 or SEQ ID NO: 145. It should be clear that the applicability of the present invention is not restricted to the SYT nucleic acid sequence represented by SEQ ID NO: 59, nor is the applicability of the invention restricted to expression of a SYT nucleic acid sequence when driven by a GOS2 promoter. Examples of other constitutive promoters that may also be used to drive expression of a SYT nucleic acid sequence are shown in the definitions section.

[0347] Optionally, one or more terminator sequences may be used in the construct introduced into a plant. Additional regulatory elements may include transcriptional as well as translational enhancers. Those skilled in the art will be aware of terminator and enhancer sequences that may be suitable for use in performing the invention. An intron sequence may also be added to the 5′ untranslated region (UTR) or in the coding sequence to increase the amount of the mature message that accumulates in the cytosol, as described in the definitions section. Other control sequences (besides promoter, enhancer, silencer, intron sequences, 3′UTR and/or 5′UTR regions) may be protein and/or RNA stabilizing elements. Such sequences would be known or may readily be obtained by a person skilled in the art.

[0348] The genetic constructs of the invention may further include an origin of replication sequence that is required for maintenance and/or replication in a specific cell type. One example is when a genetic construct is required to be maintained in a bacterial cell as an episomal genetic element (e.g. plasmid or cosmid molecule). Preferred origins of replication include, but are not limited to, the f1-ori and colE1.

[0349] For the detection of the successful transfer of the nucleic acid sequences as used in the methods of the invention and/or selection of transgenic plants comprising these nucleic acids, it is advantageous to use marker genes (or reporter genes). Therefore, the genetic construct may optionally comprise a selectable marker gene. Selectable markers are described in more detail in the “definitions” section herein. The marker genes may be removed or excised from the transgenic cell once they are no longer needed. Techniques for marker removal are known in the art, useful techniques are described above in the definitions section.

[0350] The present invention also encompasses plants obtainable by the methods according to the present invention. The present invention therefore provides plants, plant parts and plant cells obtainable by the methods according to the present invention, which plants have introduced therein a SYT nucleic acid sequence and which plants, plant parts and plant cells are preferably from a crop plant, further preferably from a monocotyledonous plant.

[0351] The invention also provides a method for the production of transgenic plants having increased yield and/or early vigour under abiotic stress, comprising introduction and expression in a plant of a SYT nucleic acid sequence.

[0352] More specifically, the present invention provides a method for the production of transgenic plants, preferably monocotyledonous plants, having increased yield and/or early vigour under abiotic stress, which method comprises:
[0353] (i) introducing and expressing in a plant or plant cell a nucleic acid sequence encoding a SYT polypeptide; and
[0354] (ii) cultivating the plant cell under conditions promoting plant growth and development.

[0355] The nucleic acid of (i) may be any of the nucleic acids capable of encoding a SYT polypeptide, as defined hereinabove, or a nucleic acid sequence as represented by SEQ ID NO: 150 or SEQ ID NO: 152.

[0356] Subsequent generations of the plants obtained from cultivating step (ii) may be propagated by a variety of means, such as by clonal propagation or classical breeding techniques. For example, a first generation (or T1) transformed plant may be selfed to give homozygous second generation (or T2) transformants, and the T2 plants further propagated through classical breeding techniques.

[0357] The nucleic acid sequence may be introduced directly into a plant cell or into the plant itself (including introduction into a tissue, organ or any other part of a plant). According to a preferred feature of the present invention, the nucleic acid sequence is introduced into a plant by transformation.

[0358] Generally after transformation, plant cells or cell groupings are selected for the presence of one or more markers which are encoded by plant-expressible genes co-transferred with the gene of interest, following which the transformed material is regenerated into a whole plant. To select transformed plants, the plant material obtained in the transformation is, as a rule, subjected to selective conditions so that transformed plants can be distinguished from untransformed plants. For example, the seeds obtained in the above-described manner can be planted and, after an initial growing period, subjected to a suitable selection by spraying. A further possibility consists in growing the seeds, if appropriate after sterilization, on agar plates using a suitable selection agent so that only the transformed seeds can grow into plants. Alternatively, the transformed plants are screened for the presence of a selectable marker such as the ones described above.

[0359] Following DNA transfer and regeneration, putatively transformed plants may also be evaluated, for instance using Southern analysis, for the presence of the gene of interest, copy number and/or genomic organisation. Alternatively or additionally, expression levels of the newly introduced DNA may be monitored using Northern and/or Western analysis, both techniques being well known to persons having ordinary skill in the art.

[0360] The generated transformed plants may be propagated by a variety of means, such as by clonal propagation or classical breeding techniques. For example, a first generation (or T1) transformed plant may be selfed to give homozygous second generation (or T2) transformants, and the T2 plants further propagated through classical breeding techniques.

[0361] The generated transformed organisms may take a variety of forms. For example, they may be chimeras of transformed cells and non-transformed cells; clonal transformants (e.g., all cells transformed to contain the expression cassette); grafts of transformed and untransformed tissues (e.g., in plants, a transformed rootstock grafted to an untransformed scion).

[0362] The present invention clearly extends to any plant cell or plant produced by any of the methods described herein, and to all plant parts and propagules thereof. The present invention extends further to encompass the progeny of a primary transformed or transfected cell, tissue, organ or whole plant that has been produced by any of the aforementioned methods, the only requirement being that progeny exhibit the same genotypic and/or phenotypic characteristic(s) as those produced by the parent in the methods according to the invention. The invention also includes host cells containing an isolated SYT nucleic acid sequence. Preferred host cells according to the invention are plant cells. The invention also extends to harvestable parts of a plant such as, but not limited to seeds, leaves, fruits, flowers, stem cultures, roots, rhizomes, tubers and bulbs. The invention furthermore relates to products derived, preferably directly derived, from a harvestable part of such a plant, such as dry pellets or powders, meal, oil, fat and fatty acids, starch or proteins.

[0363] According to a preferred feature of the invention, the modulated expression is increased expression. Methods for increasing expression of nucleic acids or genes, or gene products, are well documented in the art and examples are provided in the definitions section.

[0364] Alternatively, the expression of a nucleic acid sequence encoding a SYT polypeptide may be modulated by introducing a genetic modification, for example, by any one (or more) of the following techniques: T-DNA activation, TILLING, homologous recombination, or by introducing and expressing in a plant a nucleic acid sequence encoding a SYT polypeptide. Following introduction of the genetic modification, there follows a step of selecting for modulated expression of a nucleic acid sequence encoding a SYT polypeptide, which modulated expression gives plants having increased yield and/or early vigour under abiotic stress.

[0365] One such technique is T-DNA activation tagging. The promoter to be introduced may be any promoter capable of driving expression of a gene in the desired organism, in this case a plant. For example, constitutive, tissue-preferred, cell type-preferred and inducible promoters are all suitable for use in T-DNA activation. The effects of the invention may also be reproduced using the technique of TILLING (Targeted Induced Local Lesions In Genomes). The effects of the invention may also be reproduced using homologous recombination.

[0366] The present invention also encompasses use of SYT nucleic acid sequences and use of SYT polypeptides, and use of a construct as defined hereinabove in increasing plant yield and/or early vigour under abiotic stress.

[0367] SYT nucleic acid sequences or SYT polypeptides may find use in breeding programmes in which a DNA marker is identified that may be genetically linked to a SYT. The SYT nucleic acid sequences or SYT polypeptides may be used to define a molecular marker. This DNA or polypeptide marker may then be used in breeding programmes to select plants having increased yield. The SYT gene may, for example, be a nucleic acid sequence as represented by any one of the SYT nucleic acid sequences as given in Table 6, or orthologues or paralogues of any of the aforementioned SEQ ID NOs.

[0368] Allelic variants of a SYT nucleic acid sequence may also find use in marker-assisted breeding programmes. Such breeding programmes sometimes require introduction of allelic variation by mutagenic treatment of the plants, using for example EMS mutagenesis; alternatively, the programme may start with a collection of allelic variants of so called “natural” origin caused unintentionally. Identification of allelic variants then takes place, for example, by PCR. This is followed by a step for selection of superior allelic variants of the sequence in question and which give increased yield. Selection is typically carried out by monitoring growth performance of plants containing different allelic variants of the sequence in question, for example, different allelic variants of any one of the SYT nucleic acid sequences as given in Table 6, or orthologues or paralogues of any of the aforementioned SEQ ID NOs. Growth performance may be monitored in a greenhouse or in the field. Further optional steps include crossing plants, in which the superior allelic variant was identified, with another plant. This could be used, for example, to make a combination of interesting phenotypic features.

[0369] SYT nucleic acid sequences may also be used as probes for genetically and physically mapping the genes that they are a part of, and as markers for traits linked to those genes. Such information may be useful in plant breeding in order to develop lines with desired phenotypes. Such use of SYT nucleic acid sequences requires only a nucleic acid sequence of at least 15 nucleotides in length. The SYT nucleic acid sequences may be used as restriction fragment length polymorphism (RFLP) markers. Southern blots (Sambrook J, Fritsch E F and Maniatis T (1989) Molecular Cloning, A Laboratory Manual) of restriction-digested plant genomic DNA may be probed with the SYT nucleic acid sequences. The resulting banding patterns may then be subjected to genetic analyses using computer programs such as MapMaker (Lander et al. (1987) Genomics 1: 174-181) in order to construct a genetic map. In addition, the nucleic acid sequences may be used to probe Southern blots containing restriction endonuclease-treated genomic DNAs of a set of individuals representing parent and progeny of a defined genetic cross. Segregation of the DNA polymorphisms is noted and used to calculate the position of the SYT nucleic acid sequence in the genetic map previously obtained using this population (Botstein et al. (1980) Am. J. Hum. Genet. 32:314-331).

[0370] The production and use of plant gene-derived probes for use in genetic mapping is described in Bematzky and Tanksley (1986) Plant Mol. Biol. Reporter 4: 37-41. Numerous publications describe genetic mapping of specific cDNA clones using the methodology outlined above or variations thereof. For example, F2 intercross populations, backcross populations, randomly mated populations, near isogenic lines, and other sets of individuals may be used for mapping. Such methodologies are well known to those skilled in the art.

[0371] The nucleic acid probes may also be used for physical mapping (i.e., placement of sequences on physical maps; see Hoheisel et al. In: Non-mammalian Genomic Analysis: A Practical Guide, Academic press 1996, pp. 319-346, and references cited therein).

[0372] In another embodiment, the nucleic acid probes may be used in direct fluorescence in situ hybridization (FISH) mapping (Trask (1991) Trends Genet. 7:149-154). Although current methods of FISH mapping favor use of large clones (several kb to several hundred kb; see Laan et al. (1995) Genome Res. 5:13-20), improvements in sensitivity may allow performance of FISH mapping using shorter probes.

[0373] A variety of nucleic acid amplification-based methods for genetic and physical mapping may be carried out using the nucleic acid sequences. Examples include allele-specific amplification (Kazazian (1989) J. Lab. Clin. Med 11:95-96), polymorphism of PCR-amplified fragments (CAPS; Sheffield et al. (1993) Genomics 16:325-332), allele-specific ligation (Landegren et al. (1988) Science 241:1077-1080), nucleotide extension reactions (Sokolov (1990) Nucleic Acid Res. 18:3671), Radiation Hybrid Mapping (Walter et al. (1997) Nat. Genet. 7:22-28) and Happy Mapping (Dear and Cook (1989) Nucleic Acid Res. 17:6795-6807). For these methods, the nucleic acid sequence is used to design and produce primer pairs for use in the amplification reaction or in primer extension reactions. The design of such primers is well known to those skilled in the art. In methods employing PCR-based genetic mapping, it may be necessary to identify DNA sequence differences between the parents of the mapping cross in the region corresponding to the instant nucleic acid sequence. This, however, is generally not necessary for mapping methods.

[0374] The methods according to the present invention result in plants having increased yield under abiotic stress, as described hereinbefore. These yield-enhancing traits may also be combined with other economically advantageous traits, such as further yield-enhancing traits, tolerance to various stresses, traits modifying various architectural features and/or biochemical and/or physiological features.

Detailed Description for the cpFBPase Polypeptide

[0375] Surprisingly, it has now been found that increasing expression in aboveground parts of a plant of a nucleic acid sequence encoding a chloroplastic fructose-1,6-bisphosphatase (cpFBPase) polypeptide increases plant yield relative to control plants. Therefore, according to the present invention, there is provided a method for increasing plant yield relative to control plants, comprising increasing expression in aboveground parts of a plant of a nucleic acid sequence encoding a cpFBPase polypeptide.

[0376] Reference herein to “control plants” is taken to mean any suitable control plant or plants. The “reference”, “control”, or “wild type” are used herein interchangeably and is preferably a subject, e.g. an organelle, a cell, a tissue, a plant, which is as similar to the subject matter of the invention as possible. The reference, control or wild type is in its genome, transcriptome, proteome or metabolome as similar as possible to the subject of the present invention. Preferably, the term “reference-” “control-” or “wild type-”-organelle, -cell, -tissue or plant, relates to an organelle, cell, tissue or plant, which is nearly genetically identical to the organelle, cell, tissue or plant, of the present invention or a part thereof, preferably 95%, 98%, 99.00%, 99.10%, 99.30%, 99.50%, 99.70%, 99.90%, 99.99%, 99.999% or more identical. Most preferably the “reference”, “control”, or “wild type” is preferably a subject, e.g. an organelle, a cell, a tissue, a plant, which is genetically identical to the plant, tissue, cell, organelle used according to the method of the invention except that the nucleic acid sequences or the gene product encoded by them are changed, modulated or modified according to the inventive method.

[0377] Unless otherwise specified, the terms “polynucleotides”, “nucleic acid” and “nucleic acid molecule”, are interchangeably in the present context. Unless otherwise specified, the terms “peptide”, “polypeptide” and “protein” are interchangeably in the present context. The term “sequence” may relate to polynucleotides, nucleic acids, nucleic acid molecules, peptides, polypeptides and proteins, depending on the context in which the term “sequence” is used. The terms “gene(s)”, “polynucleotide”, “nucleic acid sequence”, “nucleotide sequence”, or “nucleic acid molecule(s)” as used herein refers to a polymeric form of nucleotides of any length, either ribonucleotides or deoxyribonucleotides. The terms refer only to the primary structure of the molecule.

[0378] Thus, the terms “nucleic acid sequence”, “gene(s)”, “polynucleotide”, “nucleotide sequence”, or “nucleic acid molecule(s)” as used herein include double- and single-stranded DNA and RNA. They also include known types of modifications, for example, methylation, “caps”, substitutions of one or more of the naturally occurring nucleotides with an analog. Preferably, the DNA or RNA sequence of the invention comprises a coding sequence encoding the herein defined polypeptide.

[0379] A “coding sequence” is a nucleic acid sequence, which is transcribed into mRNA and/or translated into a polypeptide when placed under the control of appropriate regulatory sequences. The boundaries of the coding sequence are determined by a translation start codon at the 5′-terminus and a translation stop codon at the 3′-terminus. A coding sequence can include, but is not limited to mRNA, cDNA, recombinant nucleic acid sequences or genomic DNA, while introns may be present as well under certain circumstances.

[0380] The term “chloroplastic fructose-1, 6-bisphosphatase (cpFBPase) polypeptide” as defined herein refers to a polypeptide functioning in the chloroplast and comprising: (i) at least one FBPase domain; and (ii) at least one redox regulatory insertion.

[0381] An example of a cpFBPase polypeptide as defined hereinabove as functioning in the chloroplast and comprising: (i) at least one FBPase domain; and (ii) at least one redox regulatory insertion is as represented in SEQ ID NO: 155. Further such examples are represented by any one of SEQ ID NO: 157, SEQ ID NO: 159, SEQ ID NO: 161, SEQ ID NO: 163, SEQ ID NO: 165, SEQ ID NO: 167, SEQ ID NO: 169, SEQ ID NO: 171, SEQ ID NO: 173, SEQ ID NO: 175, SEQ ID NO: 177, SEQ ID NO: 179, SEQ ID NO: 181, SEQ ID NO: 183, SEQ ID NO: 185, SEQ ID NO: 187, SEQ ID NO: 189, SEQ ID NO: 191, SEQ ID NO: 193, SEQ ID NO: 195 and SEQ ID NO: 197, or orthologues or paralogues of any of the aforementioned SEQ ID NOs. The invention is illustrated by transforming plants with the Chlamydomonas reinhardthii sequence represented by SEQ ID NO: 154, encoding the polypeptide of SEQ ID NO: 155. SEQ ID NO: 157 (encoded by SEQ ID NO: 156, from Bigelowiella natans), SEQ ID NO: 159 (encoded by SEQ ID NO: 158, from Aquilegia formosa×Aquilegia pubescens), SEQ ID NO: 161 (encoded by SEQ ID NO: 160, from Arabidopsis thaliana), SEQ ID NO: 163 (encoded by SEQ ID NO: 162, from Brassica napus), SEQ ID NO: 165 (encoded by SEQ ID NO: 164, from Cyanidioschyzon merolae) SEQ ID NO: 167 (encoded by SEQ ID NO: 166, from Glycine max), SEQ ID NO: 169 (encoded by SEQ ID NO: 168, from Lycopersicon esculentum), SEQ ID NO: 171 (encoded by SEQ ID NO: 170, from Medicago truncatula), SEQ ID NO: 173 (encoded by SEQ ID NO: 172, from Nicotiana tabacum), SEQ ID NO: 175 (encoded by SEQ ID NO: 174, from Oryza sativa), SEQ ID NO: 177 (encoded by SEQ ID NO: 176, from Ostreococcus lucimarinus), SEQ ID NO: 179 (encoded by SEQ ID NO: 178, from Ostreococcus tauri), SEQ ID NO: 181 (encoded by SEQ ID NO: 180, from Phaeodactylum tricornutum), SEQ ID NO: 183 (encoded by SEQ ID NO: 182, from Pisum sativa), SEQ ID NO: 185 (encoded by SEQ ID NO: 184, from Poncirus trifoliata), SEQ ID NO: 187 (encoded by SEQ ID NO: 186, from Populus tremuloides), SEQ ID NO: 189 (encoded by SEQ ID NO: 188, from Solanum tuberosum), SEQ ID NO: 191 (encoded by SEQ ID NO: 190, from Spinacia oleracea), SEQ ID NO: 193 (encoded by SEQ ID NO: 192, from Triticum aestivum), SEQ ID NO: 195 (encoded by SEQ ID NO: 194, from Zea mays) and SEQ ID NO: 197 (encoded by SEQ ID NO: 196, from Physicomitrella patens), are orthologues of the polypeptide of SEQ ID NO: 155.

[0382] It is to be understood that sequences falling under the definition of a “cpFBPase polypeptide” are not to be limited to the polypeptides given in Table 7 (and mentioned herein above) but that any polypeptide functioning in the chloroplast and comprising: (i) at least one FBPase domain; and (ii) at least one redox regulatory insertion, may be suitable in performing the methods of the invention. Preferably, the cpFBPase polypeptide is as represented by SEQ ID NO: 155.

[0383] However, performance of the invention is not restricted to these sequences; the methods of the invention may advantageously be performed using any cpFBPase-encoding nucleic acid or cpFBPase polypeptide as defined herein.

[0384] Examples of nucleic acids encoding cpFBPase polypeptides are given in Table C of Example 12 herein. Such nucleic acids are useful in performing the methods of the invention. The amino acid sequences given in Table C of Example 12 are example sequences of orthologues and paralogues of the cpFBPase polypeptide represented by SEQ ID NO: 155, the terms “orthologues” and “paralogues” being as defined herein. Orthologues and paralogues may easily be found by performing a so-called reciprocal blast search. This may be done by a first BLAST involving BLASTing a query sequence (for example, SEQ ID NO: 154 or SEQ ID NO: 155) against any sequence database, such as the publicly available NCBI database. BLASTN or TBLASTX (using standard default values) may be used when starting from a nucleotide sequence and BLASTP or TBLASTN (using standard default values) may be used when starting from a polypeptide sequence. The BLAST results may optionally be filtered. The full-length sequences of either the filtered results or non-filtered results are then BLASTed back (second BLAST) against sequences from the organism from which the query sequence is derived (where the query sequence is SEQ ID NO: 154 or SEQ ID NO: 155, the second BLAST would therefore be against Chlamydomonas sequences). The results of the first and second BLASTs are then compared. A paralogue is identified if a high-ranking hit from the first BLAST is from the same species as from which the query sequence is derived, a BLAST back then ideally results in the query sequence as highest hit (besides itself); an orthologue is identified if a high-ranking hit in the first BLAST is not from the same species as from which the query sequence is derived and preferably results upon BLAST back in the query sequence amongst the highest hits. High-ranking hits are those having a low E-value. The lower the E-value, the more significant the score (or in other words the lower the chance that the hit was found by chance). Computation of the E-value is well known in the art. In addition to E-values, comparisons are also scored by percentage identity. Percentage identity refers to the number of identical nucleotides (or amino acids) between the two compared nucleic acid (or polypeptide) sequences over a particular length. An example detailing the identification of orthologues and paralogues is given in Example 12. In the case of large families, ClustalW may be used, followed by a neighbour joining tree, to help visualize clustering of related genes and to identify orthologues and paralogues. Preferably, cpFBPase polypeptides useful in the methods of the invention are functioning in the chloroplast and comprise: (i) at least one FBPase domain; and (ii) at least one redox regulatory insertion; and (iii) in increasing order of preference, at least 40%, 45%, 50%, 55%, 65%, 70%, 75%, 80%, 85%, 90%, 95% or 98% sequence identity to SEQ ID NO: 155 (calculations shown in Example 14).

[0385] The alignment of multiple polypeptide sequences is used to find conserved domains and characteristic motifs in protein families, in the determination of evolutionary linkage and in the improved prediction of secondary and tertiary structure. Many programs are available to a person skilled in the art to perform such analysis, for example, the ones proposed by the Expasy proteomics toolbox hosted by the Swiss Institute for Bioinformatics.

[0386] Methods for the alignment of sequences for comparison are well known in the art, such methods include GAP, BESTFIT, BLAST, FASTA and TFASTA. GAP uses the algorithm of Needleman and Wunsch ((1970) J Mol Biol 48: 443-453) to find the global (i.e. spanning the complete sequences) alignment of two sequences that maximizes the number of matches and minimizes the number of gaps. The BLAST algorithm (Altschul et al. (1990) J Mol Biol 215: 403-10) calculates percent sequence identity and performs a statistical analysis of the similarity between the two sequences. The software for performing BLAST analysis is publicly available through the National Centre for Biotechnology Information (NCBI). Homologues may readily be identified using, for example, the ClustalW multiple sequence alignment algorithm (version 1.83), with the default pairwise alignment parameters, and a scoring method in percentage. Global percentages of similarity and identity may also be determined using one of the methods available in the MatGAT software package (Campanella et al., BMC Bioinformatics. 2003 Jul. 10; 4:29. MatGAT: an application that generates similarity/identity matrices using protein or DNA sequences.). Minor manual editing may be performed to optimise alignment between conserved motifs, as would be apparent to a person skilled in the art. Furthermore, instead of using full-length sequences for the identification of homologues, specific domains may also be used. The sequence identity values may be determined over the entire nucleic acid or amino acid sequence or over selected domains or conserved motif(s), using the programs mentioned above using the default parameters.

[0387] The terms “domain” and “motif” are described in the definitions section. Special databases exist for the identification of domains. The FBPase domain in a cpFBPase polypeptide may be identified using, for example, SMART (Schultz et al. (1998) Proc. Natl. Acad. Sci. USA 95, 5857-5864; Letunic et al. (2002) Nucleic Acids Res 30, 242-244; hosted by the EMBL at Heidelberg, Germany), InterPro (Mulder et al., (2003) Nucl. Acids. Res. 31, 315-318; hosted by the European Bioinformatics Institute (EBI) in the United Kingdom), Prosite (Bucher and Bairoch (1994), A generalized profile syntax for biomolecular sequences motifs and its function in automatic sequence interpretation. (In) ISMB-94; Proceedings 2nd International Conference on Intelligent Systems for Molecular Biology. Altman R., Brutlag D., Karp P., Lathrop R., Searls D., Eds., pp 53-61, AAAIPress, Menlo Park; Hulo et al., Nucl. Acids. Res. 32: D134-D137, (2004), The ExPASy proteomics server is provided as a service to the scientific community (hosted by the Swiss Institute of Bioinformatics (SIB) in Switzerland) or Pfam (Bateman et al., Nucleic Acids Research 30(1): 276-280 (2002), hosted by the Sanger Institute in the United Kingdom). For example, in the InterPro database, the FBPase domain comprised in the cpFBPase polypeptide is designated IPR000146. In Example 15 are listed the entries identified in a number of databases, related to a cpFBPase polypeptide as represented by SEQ ID NO: 155.

[0388] An important motif comprised within the FBPase domain is the redox regulatory insertion, which is present only the cpFBPase polypeptides and not in the cyFBPase polypeptides. By aligning all FBPases polypeptides using the methods described hereinabove and in Example 13 (and FIG. 12), an insertion of amino acids comprising at least two cysteine residues necessary for disulphide bridge formation (i.e. redox regulation) is identified. The conserved cysteines are named after their position in the mature pea (Pisum sativa) polypeptide, i.e. Cys153, Cys173 and Cys178. Cys153 and Cys173 usually are the two partners involved in disulphide bridge formation (Chiadmi et al. (1999) EMBO J 18(23): 6809-6815). Cys153 and Cys173 are separated by a loop whose length is of 10, 11, 12, 13, 14, 15, 16, 17, 18, 19, 20, 21, 22, 23, 24, or 25 amino acid residues, preferably of 14, 15, 16, 17, 18, or 19 amino acid residues.

[0389] The task of protein subcellular localisation prediction is important and well studied. Knowing a protein's localisation helps elucidate its function. Experimental methods for protein localization range from immunolocalization to tagging of proteins using green fluorescent protein (GFP). Such methods are accurate although labor-intensive compared with computational methods. Recently much progress has been made in computational prediction of protein localisation from sequence data. Among algorithms well known to a person skilled in the art are available at the ExPASy Proteomics tools hosted by the Swiss Institute for Bioinformatics, for example, PSort, TargetP, ChloroP, Predotar, LipoP, MITOPROT, PATS, PTS1, SignalP and others. The identification of subcellular localisation of the polypeptide of the invention is shown in Example 16. In particular SEQ ID NO: 155 of the present invention is assigned to the plastidic (chloroplastic) compartment of photosynthetic (autotrophic) cells.

[0390] Methods for targeting to plastids are well known in the art and include the use of transit peptides. Table 7 below shows examples of transit peptides which can be used to target any FBPase polypeptide to a plastid, which FBPase polypeptide is not, in its natural form, normally targeted to a plastid, or which FBPase polypeptide in its natural form is targeted to a plastid by virtue of a different transit peptide (for example, its natural transit peptide). For example a nucleic acid sequence encoding a cyFBPase may also be suitable for use in the methods of the invention so long as the nucleic acid is targeted to a plastid, preferably to a chloroplast, and that is comprises at least one regulatory redox insertion.

TABLE 7
Examples of transit peptide sequences
useful in targeting amino acids to plastids

| NCBI | | | |
|---|---|---|---|
| Accession | Source | Protein | Transit |
| Number | Organism | Function | Peptide Sequence |
| P07839 | Chlamy- | Ferredoxin | MAMAMRSTFAARVGAK |
| | domonas | | PAVRGARPASRMSCMA |
| | | | (SEQ ID NO: 351) |
| AAR23425 | Chlamy- | Rubisco | MQVTMKSSAVSGQRVG |
| | domonas | activase | GARVATRSVRRAQLQV |
| | | | (SEQ ID NO: 352) |
| CAA56932 | Arabidopsis | Asp amino | MASLMLSLGSTSLLPR |
| | thaliana | transferase | EINKDKLKLGTSASNP |
| | | | FLKAKSFSRVTMTVAV |
| | | | KPSR |
| | | | (SEQ ID NO: 353) |
| CAA31991 | Arabidopsis | Acyl | MATQFSASVSLQTSCL |
| | thaliana | carrier | ATTRISFQKPALISNH |
| | | protein1 | GKTNLSFNLRRSIPSR |
| | | | RLSVSC |
| | | | (SEQ ID NO: 354) |
| CAB63798 | Arabidopsis | Acyl | MASIAASASISLQARP |
| | thaliana | carrier | RQLAIAASQVKSFSNG |
| | | protein2 | RRSSLSFNLRQLPTRL |
| | | | TVSCAAKPETVDKVCA |
| | | | VVRKQL |
| | | | (SEQ ID NO: 355) |
| CAB63799 | Arabidopsis | Acyl | MASIATSASTSLQARP |
| | thaliana | carrier | RQLVIGAKQVKSFSYG |
| | | protein3 | SRSNLSFNLRQLPTRL |
| | | | TVYCAAKPETVDKVCA |
| | | | VVRKQLSLKE |
| | | | (SEQ ID NO: 356) |

cpFBPase polypeptides as represented by SEQ ID NO: 155 are enzymes with as Enzyme Commission (EC; classification of enzymes by the reactions they catalyse) number EC 3.1.3.11 for fructose-bisphosphatase (also called D-fructose-1,6-bisphosphate 1-phosphohydrolase). cpFBPase polypeptides catalyze the irreversible conversion of fructose-1,6-bisphosphate to fructose-6-phosphate and Pi. The functional assay may be an assay for cpFBPase activity based on a colorimetric Pi assay, as described by Huppe and Buchanan (1989) in Naturforsch. 44c: 487-494. Other methods to assay the enzymatic activity are described by Alscher-Herman (1982) in Plant Physiol 70: 728-734.

[0391] By “functioning in the chloroplast” is taken to mean herein that the cpFBPase polypeptide is active in the chloroplast, i.e., the cpFBPase polypeptide is performing the enzymatic reaction consisting in hydrolysing fructose-1, 6-bisphosphate into fructose-6-phosphate and Pi, in the chloroplast.

[0392] The nucleic acid sequences encoding cpFBpase polypeptides as given in Table 7, or encoding orthologues or paralogues of any of the aforementioned SEQ ID NOs need not be full-length nucleic acid sequences, since performance of the methods of the invention does not rely on the use of full-length nucleic acid sequences.

[0393] cpFBPase nucleic acid variants may also be suitable in practising the methods of the invention. Variant cpFBPase nucleic acid sequences typically are those having the same function as a naturally occurring cpFBPase nucleic acid sequence, which can be the same biological function or the function of increasing yield when expression of the nucleic acid sequence is increased in aboveground parts of a plant relative to a control plant. Examples of such cpFBPase variants include portions of nucleic acid sequences, nucleic acid sequences capable of hybridising to cpFBPases, splice variants, allelic variants either naturally occurring or by DNA manipulation, a cpFBPase nucleic acid sequence obtained by gene shuffling, or a cpFBPase nucleic acid sequence obtained by site-directed mutagenesis.

[0394] The term “portion” as used herein refers to a piece of DNA encoding a polypeptide functioning in the chloroplast and comprising: (i) at least one FBPase domain; and (ii) at least one redox regulatory insertion.

[0395] A portion may be prepared, for example, by making one or more deletions to a nucleic acid encoding a cpFBPase polypeptide as defined hereinabove. The portions may be used in isolated form or they may be fused to other coding (or non coding) sequences in order to, for example, produce a polypeptide that combines several activities. In another example, the naturally occurring transit peptide coding sequence may be replaced by a transit peptide coding sequence from another photosynthetic organism, or by a synthetic one. If chloroplast transformation is considered, the transit peptide coding sequence may be removed altogether. When fused to other coding sequences, the resultant polypeptide produced upon translation may be bigger than that predicted for the cpFBPase portion. Portions useful in the methods of the invention are typically at least 900 nucleotides in length, preferably at least 1000 nucleotides in length, more preferably at least 1100 nucleotides in length and most preferably at least 1200 nucleotides in length. Preferably, the portion is a portion of a nucleic acid sequence as represented by any one of the nucleic acid sequences given in Table 7, or nucleic acid sequences encoding orthologues or paralogues of any of the aforementioned SEQ ID NOs. Most preferably the portion is a portion of a nucleic acid sequence as represented by SEQ ID NO: 154.

[0396] According to the present invention, there is provided a method for increasing yield in plants, comprising increasing expression in a plant of a portion of any one of the nucleic acid sequences given in Table C of Example 12, or of a portion of a nucleic acid encoding an orthologue, paralogue or homologue of any of the amino acid sequences given in Table C of Example 12.

[0397] Another nucleic acid variant useful in the methods of the invention, is a nucleic acid capable of hybridising under reduced stringency conditions, preferably under stringent conditions, with a nucleic acid sequence encoding a cpFBPase polypeptide as defined hereinabove, or a with a portion as defined hereinabove.

[0398] According to the present invention, there is provided a method for increasing yield in plants, comprising increasing expression in a plant of a nucleic acid capable of hybridizing to any one of the nucleic acids given in Table C of Example 12, or comprising increasing expression in a plant of a nucleic acid capable of hybridising to a nucleic acid encoding an orthologue, paralogue or homologue of any of the nucleic acid sequences given in Table C of Example 12.

[0399] Hybridising sequences useful in the methods of the invention, encode a cpFBPase polypeptide functioning in the chloroplast and comprising: (i) at least one FBPase domain; and (ii) at least one redox regulatory insertion, and having substantially the same biological activity as the cpFBPase polypeptide as represented by SEQ ID NO: 155. Methods for designing probes are well known in the art. The hybridising sequence is typically less than 1000 bp in length, preferably less than 900, 800, 700, 600 or 500 bp in length. Commonly, hybridising sequence lengths for DNA-DNA hybridisations such as Southern blotting vary between 100 and 500 bp, whereas for DNA-DNA hybridisations such as in PCR amplification generally shorter than 50 but longer than 10 nucleotides. Preferably, the hybridising sequence is one that is capable of hybridising to any of the nucleic acid sequences (or to probes derived from) as represented by the nucleic acid sequences given in Table 7, or nucleic acid sequences encoding orthologues or paralogues of any of the aforementioned SEQ ID NOs, or to a portion of any of the aforementioned sequences, a portion being as defined above. Most preferably the hybridising sequence is capable of hybridising to SEQ ID NO: 154, or to portions (or probes) thereof.

[0400] Another nucleic acid variant useful in the methods of the invention is a splice variant encoding a cpFBPase polypeptide as defined hereinabove. Such variants will be ones in which the biological activity of the protein is substantially retained; this may be achieved by selectively retaining functional segments of the protein. Preferred splice variants are splice variants of the cpFBPase nucleic acid sequences as given in Table 7, or nucleic acid sequences encoding orthologues or paralogues of any of the aforementioned SEQ ID NOs. Most preferred is a splice variant of a cpFBPase nucleic acid sequence as represented by SEQ ID NO: 154.

[0401] Another nucleic acid variant useful in performing the methods of the invention is an allelic variant of a nucleic acid sequence encoding a cpFBPase polypeptide as defined hereinabove. Allelic variants exist in nature, and encompassed within the methods of the present invention is the use of these natural alleles. Preferred allelic variants are allelic variants of the cpFBPase nucleic acid sequences as given in Table 7, or nucleic acid sequences encoding orthologues or paralogues of any of the aforementioned SEQ ID NOs. Most preferred is a splice variant of a cpFBPase nucleic acid sequence as represented by SEQ ID NO: 154.

[0402] According to the present invention, there is provided a method for increasing yield in plants, comprising increasing expression in a plant of a splice variant of any one of the nucleic acid sequences given in Table C of Example 12, or of a splice variant of a nucleic acid encoding an orthologue, paralogue or homologue of any of the amino acid sequences given in Table C of Example 12.

[0403] A further nucleic acid variant useful in the methods of the invention is a nucleic acid variant encoding a cpFBPase polypeptide obtained by gene shuffling (or directed evolution). Most preferred is a nucleic acid variant obtained by gene shuffling of a cpFBPase nucleic acid sequence as represented by SEQ ID NO: 155.

[0404] According to the present invention, there is provided a method for increasing yield in plants, comprising increasing expression in a plant of a variant of any one of the nucleic acid sequences given in Table C of Example 12, or comprising increasing expression in a plant of a variant of a nucleic acid encoding an orthologue, paralogue or homologue of any of the amino acid sequences given in Table C of Example 12, which variant nucleic acid is obtained by gene shuffling.

[0405] Another nucleic acid variant useful in the methods of the invention is a nucleic acid variant encoding a cpFBPase polypeptide obtained by site-directed mutagenesis. Site-directed mutagenesis may be used to generate variants of cpFBPase nucleic acid sequences. Several methods are available to achieve site-directed mutagenesis, the most common being PCR based methods (Current Protocols in Molecular Biology, Wiley Eds). For example, a mutation affecting the disulfide bridge formation is to change one of the conserved cysteines into serine, thereby making cpFBPase constitutively active (Chiadmi et al. (1999) EMBO J 18(23): 6809-6815). Most preferred is a nucleic acid variant obtained by site-directed mutagenesis of a cpFBPase nucleic acid sequence as represented by SEQ ID NO: 154.

[0406] The following cpFBPase nucleic acid variants are examples of variants suitable in practising the methods of the invention:
[0407] (i) a portion of a cpFBPase nucleic acid sequence;
[0408] (ii) a nucleic acid sequence capable of hybridising with a cpFBPase nucleic acid sequence;
[0409] (iii) a splice variant of a cpFBPase nucleic acid sequence;
[0410] (iv) an allelic variant of a cpFBPase nucleic acid sequence;
[0411] (v) a cpFBPase nucleic acid sequence obtained by gene shuffling;
[0412] (vi) a cpFBPase nucleic acid sequence obtained by site-directed mutagenesis.

[0413] Also useful in the methods of the invention are nucleic acid sequences encoding homologues of cpFBPase polypeptides as given in Table 7, or encoding orthologues or paralogues of any of the aforementioned SEQ ID NOs.

[0414] Also useful in the methods of the invention are nucleic acid sequences encoding derivatives of any one of the cpFBPase polypeptides as given in Table 7, or orthologues or paralogues of any of the aforementioned SEQ ID NOs. Derivatives of cpFBPase polypeptides as represented by any one given in Table 7, or orthologues or paralogues of any of the aforementioned SEQ ID NOs are further examples that may be suitable for use in the methods of the invention.

[0415] Nucleic acid sequences encoding cpFBPase polypeptides may be derived from any artificial source or natural source, such as plant, algae, diatom or animal. The nucleic acid sequence may be modified from its native form in composition and/or genomic environment through deliberate human manipulation. Preferably the nucleic acid sequence encoding a cpFBPase polypeptide originates from a photosynthetic cell (Plantae kingdom). Further preferably the nucleic acid sequence encoding a cpFBPase polypeptide originates from a plant cell. More preferably, the nucleic acid sequence encoding a cpFBPase polypeptide originates from a diatom cell. Most preferably the nucleic acid sequence encoding a cpFBPase polypeptide originates from an algal (red, brown or green) cell. The nucleic acid sequence may be isolated from green algae belonging Chlorophyta or Charophyta, or from land plants, non-vascular or vascular. For example, the nucleic acid sequence encoding the cpFBPase polypeptide is isolated from Chlamydomonas sp., Chlorella sp., Bigelowiella natans, Cyanidioschyzon merolae, Ostreococcus lucimarinus, Ostreococcus tauri, Galderia sulphuraria Physicomitrella patens, Phaeodactylum tricornutum, Aquilegia formosa×Aquilegia pubescens, Arabidopsis thaliana, Brassica napus, Glycine max, Lycopersicon esculentum, Medicago truncatula, Nicotiana tabacum, Oryza sativa, Pisum sativa, Poncirus trifoliate, Populus tremuloides, Solanum tuberosum, Spinacia oleracea, Triticum aestivum, Zea mays and more. Most preferably the nucleic acid sequence encoding a cpFBPase polypeptide is from Chalmydomonas reinhardtii.

[0416] Performance of the methods of the invention gives plants having enhanced yield. The terms “yield”, “increased”, “improved”, “enhanced”, “amplified”, “extended”, “augmented” or “rised” are interchangeable and are defined above. Increased biomass may manifest itself as increased root biomass. Increased root biomass may be due to increased number of roots, increased root thickness and/or increased root length. Increased yield may manifest itself as one or more of the following:
[0417] (i) increased biomass (weight) of one or more parts of a plant, particularly aboveground (harvestable) parts, increased root biomass or increased biomass of any other harvestable part;
[0418] (ii) increased early vigour, defined herein as the seedling aboveground area three weeks post-germination;
[0419] (iii) increased total seed yield, which includes an increase in seed biomass (seed weight) and which may be an increase in the seed weight per plant or on an individual seed basis;
[0420] (iv) increased number of panicles per plant;
[0421] (v) increased number of flowers (“florets”) per panicle;
[0422] (vi) increased seed fill rate;
[0423] (vii) increased number of (filled) seeds;
[0424] (viii) increased seed size (length, width area, perimeter), which may also influence the composition of seeds;
[0425] (ix) increased seed volume, which may also influence the composition of seeds;
[0426] (x) increased harvest index, which is expressed as a ratio of the yield of harvestable parts, such as seeds, over the total biomass; and
[0427] (xi) increased thousand kernel weight (TKW), which is extrapolated from the number of filled seeds counted and their total weight. An increased TKW may result from an increased seed size and/or seed weight. An increased TKW may result from an increase in embryo size and/or endosperm size.

[0428] An increase in seed size, seed volume, seed area, seed perimeter, seed width and seed length may be due to an increase in specific parts of a seed, for example due to an increase in the size of the embryo and/or endosperm and/or aleurone and/or scutellum, or other parts of a seed.

[0429] In particular, increased yield is increased seed yield, and is selected from one or more of the following: (i) increased seed weight; (ii) increased number of filled seeds; (iii) increased seed fill rate; and (iv) increased harvest index.

[0430] Taking corn as an example, a yield increase may be manifested as one or more of the following: increase in the number of plants per square meter, an increase in the number of ears per plant, an increase in the number of rows, number of kernels per row, kernel weight, thousand kernel weight, ear length/diameter, increase in the seed filling rate (which is the number of filled seeds divided by the total number of seeds and multiplied by 100), among others.

[0431] Taking rice as an example, a yield increase may be manifested by an increase in one or more of the following: number of plants per square meter, number of panicles per plant, number of spikelets per panicle, number of flowers (florets) per panicle (which is expressed as a ratio of the number of filled seeds over the number of primary panicles), increase in the seed filling rate (which is the number of filled seeds divided by the total number of seeds and multiplied by 100), increase in thousand kernel weight, among others.

[0432] An increase in yield may also result in modified architecture, or may occur as a result of modified architecture.

[0433] According to a preferred feature, performance of the methods of the invention results in plants having increased seed yield relative to control plants. Therefore, according to the present invention, there is provided a method for increasing seed yield, which method comprises increasing expression in aboveground parts of a plant of a nucleic acid sequence encoding a cpFBPase polypeptide.

[0434] Since the transgenic plants according to the present invention have increased yield, it is likely that these plants exhibit an increased growth rate (during at least part of their life cycle), relative to the growth rate of control plants at a corresponding stage in their life cycle.

[0435] The increased growth rate may be specific to one or more parts of a plant (including seeds), or may be throughout substantially the whole plant. Plants having an increased growth rate may have a shorter life cycle. The life cycle of a plant may be taken to mean the time needed to grow from a dry mature seed up to the stage where the plant has produced dry mature seeds, similar to the starting material. This life cycle may be influenced by factors such as early vigour, growth rate, greenness index, flowering time and speed of seed maturation. The increase in growth rate may take place at one or more stages in the life cycle of a plant or during substantially the whole plant life cycle. Increased growth rate during the early stages in the life cycle of a plant may reflect enhanced vigour. The increase in growth rate may alter the harvest cycle of a plant allowing plants to be sown later and/or harvested sooner than would otherwise be possible (a similar effect may be obtained with earlier flowering time). If the growth rate is sufficiently increased, it may allow for the further sowing of seeds of the same plant species (for example sowing and harvesting of rice plants followed by sowing and harvesting of further rice plants all within one conventional growing period). Similarly, if the growth rate is sufficiently increased, it may allow for the further sowing of seeds of different plants species (for example the sowing and harvesting of corn plants followed by, for example, the sowing and optional harvesting of soybean, potato or any other suitable plant). Harvesting additional times from the same rootstock in the case of some crop plants may also be possible. Altering the harvest cycle of a plant may lead to an increase in annual biomass production per square meter (due to an increase in the number of times (say in a year) that any particular plant may be grown and harvested). An increase in growth rate may also allow for the cultivation of transgenic plants in a wider geographical area than their wild-type counterparts, since the territorial limitations for growing a crop are often determined by adverse environmental conditions either at the time of planting (early season) or at the time of harvesting (late season). Such adverse conditions may be avoided if the harvest cycle is shortened. The growth rate may be determined by deriving various parameters from growth curves, such parameters may be: T-Mid (the time taken for plants to reach 50% of their maximal size) and T-90 (time taken for plants to reach 90% of their maximal size), amongst others.

[0436] According to a preferred feature of the present invention, performance of the methods of the invention gives plants having an increased growth rate relative to control plants. Therefore, according to the present invention, there is provided a method for increasing the growth rate of plants, which method comprises modulating expression, preferably increasing expression, in a plant of a nucleic acid encoding a cpFBPase polypeptide as defined herein.

[0437] An increase in yield and/or growth rate occurs whether the plant is under non-stress conditions or whether the plant is exposed to various stresses compared to control plants. Plants typically respond to exposure to stress by growing more slowly. In conditions of severe stress, the plant may even stop growing altogether. Mild stress on the other hand is defined herein as being any stress to which a plant is exposed which does not result in the plant ceasing to grow altogether without the capacity to resume growth. Mild stress in the sense of the invention leads to a reduction in the growth of the stressed plants of less than 40%, 35% or 30%, preferably less than 25%, 20% or 15%, more preferably less than 14%, 13%, 12%, 11% or 10% or less in comparison to the control plant under non-stress conditions. Due to advances in agricultural practices (irrigation, fertilization, pesticide treatments) severe stresses are not often encountered in cultivated crop plants. As a consequence, the compromised growth induced by mild stress is often an undesirable feature for agriculture. Mild stresses are the everyday biotic and/or abiotic (environmental) stresses to which a plant is exposed. Abiotic stresses may be due to drought or excess water, anaerobic stress, salt stress, chemical toxicity, oxidative stress and hot, cold or freezing temperatures. The abiotic stress may be an osmotic stress caused by a water stress (particularly due to drought), salt stress, oxidative stress or an ionic stress. Biotic stresses are typically those stresses caused by pathogens, such as bacteria, viruses, fungi and insects.

[0438] In particular, the methods of the present invention may be performed under non-stress conditions or under conditions of mild drought to give plants having increased yield relative to control plants. As reported in Wang et al. (Planta (2003) 218: 1-14), abiotic stress leads to a series of morphological, physiological, biochemical and molecular changes that adversely affect plant growth and productivity. Drought, salinity, extreme temperatures and oxidative stress are known to be interconnected and may induce growth and cellular damage through similar mechanisms. Rabbani et al. (Plant Physiol (2003) 133: 1755-1767) describes a particularly high degree of “cross talk” between drought stress and high-salinity stress. For example, drought and/or salinisation are manifested primarily as osmotic stress, resulting in the disruption of homeostasis and ion distribution in the cell. Oxidative stress, which frequently accompanies high or low temperature, salinity or drought stress, may cause denaturing of functional and structural proteins. As a consequence, these diverse environmental stresses often activate similar cell signalling pathways and cellular responses, such as the production of stress proteins, up-regulation of anti-oxidants, accumulation of compatible solutes and growth arrest. The term “non-stress” conditions as used herein are those environmental conditions that allow optimal growth of plants. Persons skilled in the art are aware of normal soil conditions and climatic conditions for a given location.

[0439] Performance of the methods of the invention gives plants grown under non-stress conditions or under mild drought conditions increased yield relative to control plants grown under comparable conditions. Therefore, according to the present invention, there is provided a method for increasing yield in plants grown under non-stress conditions or under mild drought conditions, which method comprises increasing expression in a plant of a nucleic acid encoding a cpFBPase polypeptide.

[0440] Performance of the methods of the invention gives plants grown under conditions of nutrient deficiency, particularly under conditions of nitrogen deficiency, increased yield relative to control plants grown under comparable conditions. Therefore, according to the present invention, there is provided a method for increasing yield in plants grown under conditions of nutrient deficiency, which method comprises increasing expression in a plant of a nucleic acid encoding a cpFBPase polypeptide. Nutrient deficiency may result from a lack of nutrients such as nitrogen, phosphates and other phosphorous-containing compounds, potassium, calcium, cadmium, magnesium, manganese, iron and boron, amongst others.

[0441] Preferably the increase in yield and/or growth rate occurs according to the method of invention under non-stress or mild abiotic or mild biotic stress conditions.

[0442] The term “expression” or “gene expression” means the transcription of a specific gene or specific genes or specific genetic construct. The term “expression” or “gene expression” in particular means the transcription of a gene or genes or genetic construct into structural RNA (rRNA, tRNA) or mRNA with or without subsequent translation of the latter into a protein. The process includes transcription of DNA and processing of the resulting mRNA product.

[0443] The term “increasing expression” is defined above. The increase in expression of the nucleic acid sequence encoding a cpFBPase polypeptide in aboveground parts leads to increased yield of the plants relative to control plants. Preferably, the increase in expression of the nucleic acid is 1.25, 1.5, 1.75, 2, 5, 7.5, 10, 15, 20, 25, 30, 35, 40, 45, 50, 55, 60, 65, 70, 75, 80, 85, 90, 95, 100 or more fold the expression of the endogenous plant cpFBPase polypeptide.

[0444] The term “aboveground parts of plant” is herein taken to mean plant parts excluding the roots, root hairs and any other plant part that is in the soil, i.e., that is not directly exposed to light.

[0445] By increasing the expression (in a plastid) of a nucleic acid sequence encoding a cpFBPase polypeptide, an increase in the amount of cpFBPase polypeptide is obtained. This increase in amount of cpFBPase polypeptide (in a plastid) leads to an increase in cpFBPase activity. Alternatively, activity may also be increased when there is no change in the amount of a cpFBPase polypeptide, or even when there is a reduction in the amount of a cpFBPase polypeptide. This may occur when the intrinsic properties of the polypeptide are altered, for example, by making mutant versions that are more active than the wild type polypeptide.

[0446] The expression of a nucleic acid sequence encoding a cpFBPase polypeptide is increased in a plastid using techniques well known in the art, such as by targeting a cpFBPase polypeptide to the plastid using transit peptide sequences or by direct transformation of a cpFBPase polypeptide without transit peptide sequences, into a plastid. Expression may be increased in any plastid, however, preferred is preferentially increasing expression in a chloroplast.

[0447] The expression of a nucleic acid sequence encoding a cpFBPase polypeptide may be modulated by introducing a genetic modification, for example, by any one (or more) of the following techniques: T-DNA activation, TILLING, homologous recombination, or by introducing and expressing in a plant a nucleic acid sequence encoding a cpFBPase polypeptide. Following introduction of the genetic modification, there follows a step of selecting for increased expression of a nucleic acid sequence encoding a cpFBPase polypeptide, which increased expression gives plants having increased yield relative to control plants.

[0448] One such technique is T-DNA activation tagging. The promoter to be introduced may be any promoter capable of driving expression of a gene in the desired organism, in this case a plant. For example, constitutive, aboveground parts, below ground parts, tissue-preferred, cell type-preferred and inducible promoters are all suitable for use in T-DNA activation. The effects of the invention may also be reproduced using the technique of TILLING or using homologous recombination.

[0449] A preferred method for introducing a genetic modification is to introduce and express in aboveground parts of a plant a nucleic acid sequence encoding a cpFBPase polypeptide. The cpFBPase as defined herein refers to a polypeptide functioning in the chloroplast and comprising: (i) at least one FBPase domain; and (ii) at least one redox regulatory insertion.

[0450] In one embodiment of the present invention, the expression of a nucleic acid sequence encoding a cpFBPase polypeptide is increased expression (in aboveground parts of plant). The increase in expression may lead to raised cpFBPase mRNA or polypeptide levels, which could equate to raised activity of the cpFBPase polypeptide; or the activity may also be raised when there is no change in polypeptide levels, or even when there is a reduction in polypeptide levels. This may occur when the intrinsic properties of the cpFBPase polypeptide are altered, for example, by making mutant versions that are more active that the wild type polypeptide. Methods for increasing expression of genes or gene products are well documented in the art.

[0451] The invention also provides genetic constructs and vectors to facilitate introduction and/or expression of the nucleotide sequences useful in the methods according to the invention.

[0452] Therefore, there is provided a genetic construct comprising:
[0453] (i) A nucleic acid sequence encoding a cpFBPase polypeptide, as defined hereinabove;
[0454] (ii) One or more control sequences capable of driving expression in aboveground parts of a plant, of the nucleic acid sequence of (i); and optionally
[0455] (iii) A transcription termination sequence;

[0456] A preferred construct is one whether the control sequence is a promoter derived from a plant, preferably from a monocotyledonous plant if a monocotyledonous is to be transformed.

[0457] Constructs useful in the methods according to the present invention may be constructed using recombinant DNA technology well known to persons skilled in the art. The genetic constructs may be inserted into vectors, which may be commercially available, suitable for transforming into plants and suitable for expression of the gene of interest in the transformed cells. The invention therefore provides use of a genetic construct as defined hereinabove in the methods of the invention.

[0458] Plants are transformed with a vector comprising the sequence of interest (i.e., a nucleic acid sequence encoding a cpFBPase polypeptide). The sequence of interest is operably linked to one or more control sequences (at least to a promoter). The terms “regulatory element”, “control sequence” and “promoter” are all used interchangeably herein and are defined above.

[0459] Advantageously, the promoter used to drive expression of the nucleic acid sequence may be a tissue-preferred promoter, i.e. one that is capable of preferentially initiating transcription in certain tissues, such as the leaves, stems, seed tissue etc. Promoters able to initiate transcription in certain tissues only are referred to herein as “tissue-specific”, similarly, promoters able to initiate transcription in certain cells only are referred to herein as “cell-specific”. Additionally or alternatively, the promoter may occur natural or synthetic. Preferably, the promoter is capable of driving expression of a nucleic acid encoding a cpFBPase polypeptide in aboveground parts of a plant, i.e., in parts exposed to light for proper cpFBPase redox regulation.

[0460] Other suitable promoters are constitutive promoters (Benfey et al., EMBO J. 8 (1989) 2195-2202), such as those which originate from plant viruses, such as 35S CAMV (Franck et al., Cell 21 (1980) 285-294), 19S CaMV (see also U.S. Pat. No. 5,352,605 and WO 84/02913), 34S FMV (Sanger et al., Plant. Mol. Biol., 14, 1990: 433-443), the parsley ubiquitin promoter, or plant promoters such as the Rubisco small subunit promoter described in U.S. Pat. No. 4,962,028 or the plant promoters PRP1 [Ward et al., Plant. Mol. Biol. 22 (1993)], SSU, PGEL1, OCS [Leisner (1988) Proc Natl Acad Sci USA 85(5): 2553-2557], lib4, usp, mas [Comai (1990) Plant Mol Biol 15 (3):373-381], STLS1, ScBV (Schenk (1999) Plant Mol Biol 39(6):1221-1230), B33, SAD1 or SAD2 (flax promoters, Jain et al., Crop Science, 39 (6), 1999: 1696-1701) or nos [Shaw et al. (1984) Nucleic Acids Res. 12(20):7831-7846]. Further examples of constitutive plant promoters are the sugarbeet V-ATPase promoters (WO 01/14572). Examples of synthetic constitutive promoters are the Super promoter (WO 95/14098) and promoters derived from G-boxes (WO 94/12015). If appropriate, chemical inducible promoters may furthermore also be used, compare EP-A 388186, EP-A 335528, WO97/06268. Stable, constitutive expression of the polypeptides according to the invention a plant can be advantageous. However, inducible expression of the polypeptide of the invention is advantageous, if a late expression before the harvest is of advantage, as metabolic manipulation may lead to plant growth retardation.

[0461] The expression of plant genes can also be facilitated via a chemical inducible promoter. Examples of such promoters are a salicylic acid inducible promoter (WO 95/19443), and abscisic acid-inducible promoter (EP 335 528), a tetracyclin-inducible promoter (Gatz et al. (1992) Plant J. 2, 397-404), a cyclohexanol- or ethanol-inducible promoter (WO 93/21334) or others as described herein.

[0462] Other suitable promoters are those that react to biotic or abiotic stress, for example the pathogen-induced PRP1 gene promoter (Ward et al., Plant. Mol. Biol. 22 (1993) 361-366), the tomato heat-inducible hsp80 promoter (U.S. Pat. No. 5,187,267), the potato chill-inducible alpha-amylase promoter (WO 96/12814) or the wound-inducible pinII promoter (EP-A-0 375 091) or others as described herein.

[0463] Preferred promoters are in particular those which effect expression in tissues and organs, in seed cells, such as endosperm cells and cells of the developing embryo. Suitable promoters are the oilseed rape napin gene promoter (U.S. Pat. No. 5,608,152), the Vicia faba USP promoter (Baeumlein et al., Mol Gen Genet, 1991, 225 (3): 459-67), the Arabidopsis oleosin promoter (WO 98/45461), the Phaseolus vulgaris phaseolin promoter (U.S. Pat. No. 5,504,200), the Brassica Bce4 promoter (WO 91/13980), the bean arc5 promoter, the carrot DcG3 promoter, or the Legumin B4 promoter (LeB4; Baeumlein et al., 1992, Plant Journal, 2 (2): 233-9), and promoters which bring about the seed-specific expression in monocotyledonous plants such as maize, barley, wheat, rye, rice and the like. Advantageous seed-specific promoters are the sucrose binding protein promoter (WO 00/26388), the phaseolin promoter and the napin promoter. Suitable promoters which must be considered are the barley Ipt2 or Ipt1 gene promoter (WO 95/15389 and WO 95/23230), and the promoters described in WO 99/16890 (promoters from the barley hordein gene, the rice glutelin gene, the rice oryzin gene, the rice prolamin gene, the wheat gliadin gene, the wheat glutelin gene, the maize zein gene, the oat glutelin gene, the sorghum kasirin gene and the rye secalin gene). Further suitable promoters are Amy32b, Amy 6-6 and Aleurain [U.S. Pat. No. 5,677,474], Bce4 (oilseed rape) [U.S. Pat. No. 5,530,149], glycinin (soya) [EP 571 741], phosphoenolpyruvate carboxylase (soya) [JP 06/62870], ADR12-2 (soya) [WO 98/08962], isocitrate lyase (oilseed rape) [U.S. Pat. No. 5,689,040] or α-amylase (barley) [EP 781 849].

[0464] Other promoters which are available for the expression of genes in plants are leaf-specific promoters such as those described in DE-A 19644478 or light-regulated promoters such as, for example, the pea petE promoter.

[0465] In one embodiment, the nucleic acid sequence is operably linked to a constitutive promoter. A constitutive promoter is transcriptionally active during most, but not necessarily all, phases of its growth and development and is substantially ubiquitously expressed (including in aboveground parts of a plant). Preferably the promoter is derived from a plant, more preferably the promoter is from a monocotyledonous plant if a monocotyledonous plant is to be transformed. Further preferably, the constitutive promoter is a GOS2 promoter that is represented by a nucleic acid sequence substantially similar to SEQ ID NO: 208 or SEQ ID NO: 56. Most preferably the GOS2 promoter is as represented by SEQ ID NO: 56 or SEQ ID NO: 208. It should be clear that the applicability of the present invention is not restricted to the cpFBPase nucleic acid sequence as represented by SEQ ID NO: 154, nor is the applicability of the invention restricted to expression of a cpFBPase nucleic acid sequence when driven by a GOS2 promoter. Examples of other constitutive promoters that may also be used to drive expression of a cpFBPase nucleic acid sequence are shown above.

[0466] Optionally, one or more terminator sequences may be used in the construct introduced into a plant. Additional regulatory elements may include transcriptional as well as translational enhancers. Those skilled in the art will be aware of terminator and enhancer sequences that may be suitable for use in performing the invention. An intron sequence may also be added to the 5′ untranslated region (UTR) or in the coding sequence to increase the amount of the mature message that accumulates in the cytosol, as described in the definitions section. Other control sequences (besides promoter, enhancer, silencer, intron sequences, 3′UTR and/or 5′UTR regions) may be protein and/or RNA stabilizing elements. Such sequences would be known or may readily be obtained by a person skilled in the art.

[0467] The genetic constructs of the invention may further include an origin of replication sequence that is required for maintenance and/or replication in a specific cell type. One example is when a genetic construct is required to be maintained in a bacterial cell as an episomal genetic element (e.g. plasmid or cosmid molecule). Preferred origins of replication include, but are not limited to, the f1-ori and colE1.

[0468] For the detection of the successful transfer of the nucleic acid sequences as used in the methods of the invention and/or selection of transgenic plants comprising these nucleic acids, it is advantageous to use marker genes (or reporter genes). Therefore, the genetic construct may optionally comprise a selectable marker gene. Selectable markers are described in more detail in the “definitions” section herein. The marker genes may be removed or excised from the transgenic cell once they are no longer needed. Techniques for marker removal are known in the art, useful techniques are described above in the definitions section. Different markers are preferred, depending on the organism and the selection method.

[0469] The present invention also encompasses plants (including seeds) obtainable by the methods according to the present invention. The present invention therefore provides plants, plant parts and plant cells obtainable by the methods according to the present invention, which plants have introduced therein a cpFBPase nucleic acid sequence and which plants, plant parts and plant cells are preferably from a crop plant, further preferably from a monocotyledonous plant.

[0470] The invention also provides a method for the production of transgenic plants having increased yield relative to control plants, comprising introduction and expression in a plant of a nucleic acid sequence encoding a cpFBPase polypeptide.

[0471] More specifically, the present invention provides a method for the production of transgenic plants, preferably monocotyledonous plants, having increased yield relative to control plants, which method comprises:
[0472] (i) introducing and expressing in aboveground parts of a plant or plant cell a nucleic acid sequence encoding a cpFBPase polypeptide; and
[0473] (ii) cultivating the plant cell under conditions promoting plant growth and development.

[0474] The nucleic acid of (i) may be any of the nucleic acids capable of encoding a cpFBPase polypeptide as defined herein.

[0475] The nucleic acid sequence may be introduced directly into a plant cell or into the plant itself (including introduction into a tissue, organ or any other part of a plant). According to a preferred feature of the present invention, the nucleic acid sequence is introduced into a plant by transformation.

[0476] The genetically modified plant cells can be regenerated via all methods with which the skilled worker is familiar. Suitable methods can be found in the abovementioned publications by S. D. Kung and R. Wu, Potrykus or Höfgen and Willmitzer.

[0477] Generally after transformation, plant cells or cell groupings are selected for the presence of one or more markers which are encoded by plant-expressible genes co-transferred with the gene of interest, following which the transformed material is regenerated into a whole plant. To select transformed plants, the plant material obtained in the transformation is, as a rule, subjected to selective conditions so that transformed plants can be distinguished from untransformed plants. For example, the seeds obtained in the above-described manner can be planted and, after an initial growing period, subjected to a suitable selection by spraying. A further possibility consists in growing the seeds, if appropriate after sterilization, on agar plates using a suitable selection agent so that only the transformed seeds can grow into plants. Alternatively, the transformed plants are screened for the presence of a selectable marker such as the ones described above.

[0478] Following DNA transfer and regeneration, putatively transformed plants may be evaluated, for instance using Southern analysis, for the presence of the gene of interest, copy number and/or genomic organisation. Alternatively or additionally, expression levels of the newly introduced DNA may be monitored using Northern and/or Western analysis, quantitative PCR, such techniques being well known to persons having ordinary skill in the art.

[0479] The generated transformed plants may be propagated by a variety of means, such as by clonal propagation or classical breeding techniques. For example, a first generation (or T1) transformed plant may be selfed to give homozygous second generation (or T2) transformants, and the T2 plants further propagated through classical breeding techniques.

[0480] The generated transformed organisms may take a variety of forms. For example, they may be chimeras of transformed cells and non-transformed cells; clonal transformants (e.g., all cells transformed to contain the expression cassette); grafts of transformed and untransformed tissues (e.g., in plants, a transformed rootstock grafted to an untransformed scion).

[0481] The methods of the invention are advantageously applicable to any plant. Plants that are particularly useful in the methods of the invention include all plants which belong to the superfamily Viridiplantae, in particular monocotyledonous and dicotyledonous plants including fodder or forage legumes, ornamental plants, food crops, trees or shrubs. According to a preferred embodiment of the present invention, the plant is a crop plant. Examples of crop plants include soybean, sunflower, canola, alfalfa, rapeseed, cotton, tomato, potato and tobacco. Further preferably, the plant is a monocotyledonous plant. Examples of monocotyledonous plants include sugarcane. More preferably the plant is a cereal. Examples of cereals include rice, maize, wheat, barley, millet, rye, triticale, sorghum and oats.

[0482] Other advantageous plants are selected from the group consisting of Asteraceae such as the genera Helianthus, Tagetes e.g. the species Helianthus annus [sunflower], Tagetes lucida, Tagetes erecta or Tagetes tenuifolia [Marigold], Brassicaceae such as the genera Brassica, Arabadopsis e.g. the species Brassica napus, Brassica rapa ssp. [canola, oilseed rape, turnip rape] or Arabidopsis thaliana; Fabaceae such as the genera Glycine e.g. the species Glycine max, Soja hispida or Soja max [soybean]; Linaceae such as the genera Linum e.g. the species Linum usitatissimum, [flax, linseed]; Poaceae such as the genera Hordeum, Secale, Avena, Sorghum, Oryza, Zea, Triticum e.g. the species Hordeum vulgare [barley]; Secale cereale [rye], Avena sativa, Avena fatua, Avena byzantina, Avena fatua var. sativa, Avena hybrida [oat], Sorghum bicolor [Sorghum, millet], Oryza sativa, Oryza latifolia [rice], Zea mays [corn, maize] Triticum aestivum, Triticum durum, Triticum turgidum, Triticum hybernum, Triticum macha, Triticum sativum or Triticum vulgare [wheat, bread wheat, common wheat]; Solanaceae such as the genera Solanum, Lycopersicon e.g. the species Solanum tuberosum [potato], Lycopersicon esculentum, Lycopersicon lycopersicum, Lycopersicon pyriforme, Solanum integrifolium or Solanum lycopersicum [tomato].

[0483] The present invention clearly extends to any plant cell or plant produced by any of the methods described herein, and to all plant parts and propagules thereof. The present invention extends further to encompass the progeny of a primary transformed or transfected cell, tissue, organ or whole plant that has been produced by any of the aforementioned methods, the only requirement being that progeny exhibit the same genotypic and/or phenotypic characteristic(s) as those produced by the parent in the methods according to the invention. The invention also includes host cells containing an isolated cpFBPase nucleic acid sequence. Preferred host cells according to the invention are plant cells. The invention also extends to harvestable parts of a plant such as, but not limited to seeds, leaves, fruits, flowers, stem cultures, rhizomes, tubers and bulbs. The invention furthermore relates to products derived, preferably directly derived, from a harvestable part of such a plant, such as dry pellets or powders, meal, oil, fat and fatty acids, starch or proteins.

[0484] The present invention also encompasses use of cpFBPase nucleic acid sequences and use of cpFBPase polypeptides, and use of a construct as defined hereinabove in increasing plant yield relative to control plants. The increased plant yield is in particular increased seed yield. By increased seed yield is herein taken to mean any one of the following: (i) increased seed weight; (ii) increased number of filled seeds; (iii) increased seed fill rate; and (iv) increased harvest index.

[0485] cpFBPase nucleic acid sequences or cpFBPase polypeptides may find use in breeding programmes in which a DNA marker is identified that may be genetically linked to a cpFBPase locus. The cpFBPase nucleic acid sequences or cpFBPase polypeptides may be used to define a molecular marker. This DNA or polypeptide marker may then be used in breeding programmes to select plants having increased yield. The cpFBPase gene may, for example, be a nucleic acid sequence as represented by any one of the cpFBPase nucleic acid sequences as given in Table 7, or nucleic acid sequences encoding orthologues or paralogues of any of the aforementioned SEQ ID NOs.

[0486] Allelic variants of a cpFBPase nucleic acid sequence may also find use in marker-assisted breeding programmes. Such breeding programmes sometimes require introduction of allelic variation by mutagenic treatment of the plants, using for example EMS mutagenesis; alternatively, the programme may start with a collection of allelic variants of so called “natural” origin caused unintentionally. Identification of allelic variants then takes place, for example, by PCR. This is followed by a step for selection of superior allelic variants of the sequence in question and which give increased yield. Selection is typically carried out by monitoring growth performance of plants containing different allelic variants of the sequence in question, for example, different allelic variants of any one of the cpFBPase nucleic acid sequences as given in Table 7, or nucleic acid sequences encoding orthologues or paralogues of any of the aforementioned SEQ ID NOs. Growth performance may be monitored in a greenhouse or in the field. Further optional steps include crossing plants, in which the superior allelic variant was identified, with another plant. This could be used, for example, to make a combination of interesting phenotypic features.

[0487] cpFBPase nucleic acid sequences may also be used as probes for genetically and physically mapping the genes that they are a part of, and as markers for traits linked to those genes. Such information may be useful in plant breeding in order to develop lines with desired phenotypes. Such use of cpFBPase nucleic acid sequences requires only a nucleic acid sequence of at least 15 nucleotides in length. The cpFBPase nucleic acid sequences may be used as restriction fragment length polymorphism (RFLP) markers. Southern blots (Sambrook J, Fritsch E F and Maniatis T (1989) Molecular Cloning, A Laboratory Manual) of restriction-digested plant genomic DNA may be probed with the cpFBPase nucleic acid sequences. The resulting banding patterns may then be subjected to genetic analyses using computer programs such as MapMaker (Lander et al. (1987) Genomics 1: 174-181) in order to construct a genetic map. In addition, the nucleic acid sequences may be used to probe Southern blots containing restriction endonuclease-treated genomic DNAs of a set of individuals representing parent and progeny of a defined genetic cross. Segregation of the DNA polymorphisms is noted and used to calculate the position of the cpFBPase nucleic acid sequence in the genetic map previously obtained using this population (Botstein et al. (1980) Am. J. Hum. Genet. 32:314-331).

[0488] The production and use of plant gene-derived probes for use in genetic mapping is described in Bematzky and Tanksley (1986) Plant Mol. Biol. Reporter 4: 37-41. Numerous publications describe genetic mapping of specific cDNA clones using the methodology outlined above or variations thereof. For example, F2 intercross populations, backcross populations, randomly mated populations, near isogenic lines, and other sets of individuals may be used for mapping. Such methodologies are well known to those skilled in the art.

[0489] The nucleic acid probes may also be used for physical mapping (i.e., placement of sequences on physical maps; see Hoheisel et al. In: Non-mammalian Genomic Analysis: A Practical Guide, Academic press 1996, pp. 319-346, and references cited therein).

[0490] In another embodiment, the nucleic acid probes may be used in direct fluorescence in situ hybridization (FISH) mapping (Trask (1991) Trends Genet. 7: 149-154). Although current methods of FISH mapping favor use of large clones (several kb to several hundred kb; see Laan et al. (1995) Genome Res. 5:13-20), improvements in sensitivity may allow performance of FISH mapping using shorter probes.

[0491] A variety of nucleic acid amplification-based methods for genetic and physical mapping may be carried out using the nucleic acid sequences. Examples include allele-specific amplification (Kazazian (1989) J. Lab. Clin. Med 11:95-96), polymorphism of PCR-amplified fragments (CAPS; Sheffield et al. (1993) Genomics 16:325-332), allele-specific ligation (Landegren et al. (1988) Science 241:1077-1080), nucleotide extension reactions (Sokolov (1990) Nucleic Acid Res. 18:3671), Radiation Hybrid Mapping (Walter et al. (1997) Nat. Genet. 7:22-28) and Happy Mapping (Dear and Cook (1989) Nucleic Acid Res. 17:6795-6807). For these methods, the nucleic acid sequence is used to design and produce primer pairs for use in the amplification reaction or in primer extension reactions. The design of such primers is well known to those skilled in the art. In methods employing PCR-based genetic mapping, it may be necessary to identify DNA sequence differences between the parents of the mapping cross in the region corresponding to the instant nucleic acid sequence. This, however, is generally not necessary for mapping methods.

[0492] The methods according to the present invention result in plants having increased yield relative to control plants, as described hereinbefore. These yield-enhancing traits may also be combined with other economically advantageous traits, such as further yield-enhancing traits, tolerance to various stresses, traits modifying various architectural features and/or biochemical and/or physiological features.

### Detailed Description for the SIK Polypeptide

[0493] It has now been found that modulating expression in a plant of a SIK nucleic acid and/or a SIK polypeptide gives plants having various improved yield-related traits relative to control plants, wherein overexpression of a SIK-encoding nucleic acid in a plant gives increased number of flowers per plant relative to control plants, and wherein the reduction or substantial elimination of a SIK nucleic acid gives increased thousand kernel weight, increased harvest index and increased fill rate relative to corresponding wild type plants.

[0494] Therefore, the invention provides a method for improving yield-related traits in plants relative to control plants, comprising modulating expression in a plant of a SIK nucleic acid and/or a SIK polypeptide, wherein the modulated expression is overexpression of a SIK-encoding nucleic acid in a plant resulting in an increased number of flowers per plant relative to control plants, and wherein the modulated expression is a reduction or substantial elimination of a SIK nucleic acid resulting in an increased thousand kernel weight (TKW), increased harvest index (HI) and increased fill rate relative to corresponding wild type plants.

[0495] The term “modulation” as defined herein is taken to mean a change in the level of gene expression in comparison to a control plant. In the case where a SIK-encoding nucleic acid is being used to increase the number of flowers per plant, the expression level is increased, and in the case where a SIK nucleic acid is being used to increase TKW, HI or fill rate, the expression level is decreased. The original, unmodulated expression may be of any kind of expression of a structural RNA (rRNA, tRNA) or mRNA with subsequent translation.

[0496] The term “expression” or “gene expression” means the transcription of a specific gene or specific genes or specific genetic construct. The term “expression” or “gene expression” in particular means the transcription of a gene or genes or genetic construct into structural RNA (rRNA, tRNA) or mRNA with or without subsequent translation of the latter into a protein. The process includes transcription of DNA and processing of the resulting mRNA product.

[0497] The various improved yield-related traits are improved by at least 5%, 6%, 7%, 8%, 9% or 10%, preferably at least 15% or 20%, more preferably 25%, 30%, 35%, 40%, 45%, 50%, 55%, 60%, 65% or 70% compared to control plants.

[0498] The improvement may be in one or more of the following: increased number of flowers per plant, increased seed filling rate (which as defined herein is the ratio between the number of filled seeds divided by the total number of seeds; increased harvest index, which as defined herein is the ratio of the yield of harvestable parts, such as seeds, divided by the total biomass; and increased thousand kernel weight (TKW), which as defined herein is derived by extrapolating the number of filled seeds counted and their total weight. Increased TKW may result from an increased seed size and/or seed weight, and may also result from an increase in embryo and/or endosperm size.

[0499] An increase in thousand kernel weight, increased harvest index and increased fill rate occurs whether the plant is under non-stress conditions or whether the plant is exposed to various stresses compared to control plants. Plants typically respond to exposure to stress by growing more slowly. In conditions of severe stress, the plant may even stop growing altogether. Mild stress on the other hand is defined herein as being any stress to which a plant is exposed which does not result in the plant ceasing to grow altogether without the capacity to resume growth. Mild stress in the sense of the invention leads to a reduction in the growth of the stressed plants of less than 40%, 35% or 30%, preferably less than 25%, 20% or 15%, more preferably less than 14%, 13%, 12%, 11% or 10% or less in comparison to the control plant under non-stress conditions. Due to advances in agricultural practices (irrigation, fertilization, pesticide treatments) severe stresses are not often encountered in cultivated crop plants. As a consequence, the compromised growth induced by mild stress is often an undesirable feature for agriculture. Mild stresses are the everyday biotic and/or abiotic (environmental) stresses to which a plant is exposed. Abiotic stresses may be due to drought or excess water, anaerobic stress, salt stress, chemical toxicity, oxidative stress and hot, cold or freezing temperatures. The abiotic stress may be an osmotic stress caused by a water stress (particularly due to drought), salt stress, oxidative stress or an ionic stress. Biotic stresses are typically those stresses caused by pathogens, such as bacteria, viruses, fungi and insects.

[0500] In particular, the methods of the present invention may be performed under non-stress conditions or under conditions of mild drought to give plants having increased thousand kernel weight, increased harvest index and increased fill rate relative to control plants. As reported in Wang et al. (Planta (2003) 218: 1-14), abiotic stress leads to a series of morphological, physiological, biochemical and molecular changes that adversely affect plant growth and productivity. Drought, salinity, extreme temperatures and oxidative stress are known to be interconnected and may induce growth and cellular damage through similar mechanisms. Rabbani et al. (Plant Physiol (2003) 133: 1755-1767) describes a particularly high degree of “cross talk” between drought stress and high-salinity stress. For example, drought and/or salinisation are manifested primarily as osmotic stress, resulting in the disruption of homeostasis and ion distribution in the cell. Oxidative stress, which frequently accompanies high or low temperature, salinity or drought stress, may cause denaturing of functional and structural proteins. As a consequence, these diverse environmental stresses often activate similar cell signalling pathways and cellular responses, such as the production of stress proteins, up-regulation of anti-oxidants, accumulation of compatible solutes and growth arrest. The term “non-stress” conditions as used herein are those environmental conditions that allow optimal growth of plants. Persons skilled in the art are aware of normal soil conditions and climatic conditions for a given location.

[0501] Performance of the methods of the invention gives plants grown under non-stress conditions or under mild drought conditions increased thousand kernel weight, increased harvest index and increased fill rate relative to control plants grown under comparable conditions. Therefore, according to the present invention, there is provided a method for increasing thousand kernel weight, increased harvest index and increased fill rate in plants grown under non-stress conditions or under mild drought conditions, which method comprises increasing expression in a plant of a nucleic acid encoding a SIK polypeptide.

[0502] Performance of the methods of the invention gives plants grown under conditions of nutrient deficiency, particularly under conditions of nitrogen deficiency, increased thousand kernel weight, increased harvest index and increased fill rate relative to control plants grown under comparable conditions. Therefore, according to the present invention, there is provided a method for increasing thousand kernel weight, increased harvest index and increased fill rate in plants grown under conditions of nutrient deficiency, which method comprises increasing expression in a plant of a nucleic acid encoding a SIK polypeptide. Nutrient deficiency may result from a lack of nutrients such as nitrogen, phosphates and other phosphorous-containing compounds, potassium, calcium, cadmium, magnesium, manganese, iron and boron, amongst others.

[0503] The present invention encompasses plants or parts thereof (including seeds) obtainable by the methods according to the present invention. The plants or parts thereof comprise a nucleic acid transgene encoding a SIK polypeptide as defined above.

[0504] According to one aspect of the present invention, a reduction or substantial elimination of a SIK nucleic acid results in one or more of an increased thousand kernel weight (TKW), increased harvest index (HI) and increased fill rate relative to control plants.

[0505] Reference herein to a “SIK nucleic acid” is taken to mean a polymeric form of a deoxyribonucleotide or a ribonucleotide polymer of any length, either double- or single-stranded, or analogues thereof, that has the essential characteristic of a natural ribonucleotide in that it can hybridise to SIK nucleic acid sequences in a manner similar to naturally occurring polynucleotides.

[0506] Reference herein to “a reduction or substantial elimination of a SIK nucleic acid or gene” and to an “endogenous” SIK gene is as described in the definitions section.

[0507] For the reduction or substantial elimination of expression an endogenous SIK gene in a plant, a sufficient length of substantially contiguous nucleotides of a SIK nucleic acid sequence is required. The stretch of substantially contiguous nucleotides may be derived from any SIK nucleic acid, preferably a SIK nucleic acid represented by any one of SEQ ID NO 213 to 225 or any one of the nucleic acid sequences given in Table 8 or Table 9 below. A SIK nucleic acid sequence encoding a (functional) polypeptide is not a requirement for the various methods discussed herein for the reduction or substantial elimination of expression of an endogenous SIK gene.

[0508] This reduction or substantial elimination may be achieved using routine tools and techniques, as described above. A preferred method for the reduction or substantial elimination of expression of a SIK nucleic acid is by introducing and expressing in a plant a genetic construct into which the SIK nucleic acid is cloned as an inverted repeat (in part or completely), separated by a spacer (non-coding DNA).

[0509] According to another aspect of the present invention, overexpression in a plant of a SIK-encoding nucleic acid results in an increased number of flowers per plant relative to control plants.

[0510] A preferred method for overexpression of a SIK-encoding nucleic acid is by introducing and expressing in a plant a nucleic acid encoding a SIK polypeptide as defined below.

[0511] A “SIK-encoding nucleic acid” encodes a “SIK polypeptide” or “SIK amino acid sequence” which as defined herein is taken to mean a polypeptide according to SEQ ID NO: 210 and orthologues and paralogues thereof as defined herein.

[0512] The SIK polypeptide represented by SEQ ID NO: 210 and orthologues and paralogues thereof may typically also comprise the following features.

### ATP-Binding Region

[0513] ATP-binding region VSESLTSTSYKASFRDDFTDPKTIEAIVSRL (Motif 1, SEQ ID NO: 348) or an ATP-binding region having in increasing order of preference at least 40%, 41%, 42%, 43%, 44%, 45%, 46%, 47%, 48%, 49%, 50%, 51%, 52%, 53%, 54%, 55%, 56%, 57%, 58%, 59%, 60%, 61%, 62%, 63%, 64%, 65%, 66%, 67%, 68%, 69%, 70%, 71%, 72%, 73%, 74%, 75%, 76%, 77%, 78%, 79%, 80%, 81%, 82%, 83%, 84%, 85%, 86%, 87%, 88%, 89%, 90%, 91%, 92%, 93%, 94%, 95%, 96%, 97%, 98%, 99% identity to Motif I.

### Serine Threonine Kinase Active Site Signature

[0514] Serine threonine kinase active site signature AMYNDFSTSNIQI (SEQ ID NO: 350) with conserved D residue (Motif 2) or a serine threonine kinase active site signature having in increasing order of preference at least 40%, 41%, 42%, 43%, 44%, 45%, 46%, 47%, 48%, 49%, 50%, 51%, 52%, 53%, 54%, 55%, 56%, 57%, 58%, 59%, 60%, 61%, 62%, 63%, 64%, 65%, 66%, 67%, 68%, 69%, 70%, 71%, 72%, 73%, 74%, 75%, 76%, 77%, 78%, 79%, 80%, 81%, 82%, 83%, 84%, 85%, 86%, 87%, 88%, 89%, 90%, 91%, 92%, 93%, 94%, 95%, 96%, 97%, 98%, 99% identity to Motif II.

### Serine-Rich Domain

[0515] An N-terminal serine-rich domain.

### Myristoylation Sites

[0516] The orthologues and paralogues may further comprise one or more myristoylation sites that could serve to anchor the protein to the membrane.

### Kinase Activity

[0517] Furthermore, the SIK orthologues and paralogues will exhibit kinase activity of which can readily be determined using routine tools and techniques. Several assays are available (for example Current Protocols in Molecular Biology, Volumes 1 and 2, Ausubel et al. (1994), Current Protocols; or online such as protocol-online.org).

[0518] In brief, the kinase assay generally involves (1) bringing the kinase protein into contact with a substrate polypeptide containing the target site to be phosphorylated; (2) allowing phosphorylation of the target site in an appropriate kinase buffer under appropriate conditions; (3) separating phosphorylated products from non-phosphorylated substrate after a suitable reaction period. The presence or absence of kinase activity is determined by the presence or absence of a phosphorylated target. In addition, quantitative measurements may be performed.

[0519] Purified SIK proteins, or cell extracts containing or enriched in the SIK protein could be used as source for the kinase protein. As a substrate, small peptides are particularly well suited. The peptide must comprise one or more serine, threonine, or tyrosine residues in a phosphorylation site motif. A compilation of phosphorylation sites may be found in Biochimica et Biophysica Acta 1314, 191-225, (1996). In addition, the peptide substrates may advantageously have a net positive charge to facilitate binding to phosphocellulose filters, (allowing to separate the phosphorylated from non-phosphorylated peptides and to detect the phosphorylated peptides). If a phosphorylation site motif is not known, a general tyrosine kinase substrate may be used. For example, “Src-related peptide” (RRLIEDAEYAARG (SEQ ID NO: 357)) is a substrate for many receptor and non-receptor tyrosine kinases). To determine the kinetic parameters for phosphorylation of the synthetic peptide, a range of peptide concentrations is required. For initial reactions, a peptide concentration of 0.7-1.5 mM may be used.

[0520] For each kinase enzyme, it is important to determine the optimal buffer, ionic strength, and pH for activity. A standard 5× Kinase Buffer generally contains 5 mg/ml BSA (Bovine Serum Albumin preventing kinase adsorption to the assay tube), 150 mM Tris-Cl (pH 7.5), 100 mM MgCl₂. Divalent cations are required for most tyrosine kinases, although some tyrosine kinases (for example, insulin-, IGF-1-, and PDGF receptor kinases) require MnCl₂ instead of MgCl₂ (or in addition to MgCl₂). The optimal concentrations of divalent cations must be determined empirically for each protein kinase.

[0521] A commonly used donor of the phophoryl group is radio-labelled [gamma-³²P]ATP (normally at 0.2 mM final concentration). The amount of ³²P incorporated in the peptides may be determined by measuring activity on the nitrocellulose dry pads in a scintillation counter.

[0522] Alternatively or additionally, the activity of a SIK orthologue or paralogue may be assayed by overexpression in a plant of a nucleic acid encoding a SIK polypeptide under the control of a constitutive promoter to check for increase the number of flowers per plant relative to control plants, and also by the reduction or substantial elimination of a SIK nucleic acid under the control of a constitutive promoter to check for one or more of an increase in thousand kernel weight (TKW), harvest index (HI) and fill rate in plants relative to control plants.

[0523] The invention is illustrated by transforming plants with the Oryza sativa sequence represented by SEQ ID NO: 209, encoding the polypeptide sequence of SEQ ID NO: 210, however performance of the invention is not restricted to these sequences. The methods of the invention may advantageously be performed using any nucleic acid encoding a SIK polypeptide as defined herein, such as any of the nucleic acid sequences given in Table 8 and Table 9. The examples of orthologues and paralogues of SEQ ID NO: 210 given in Table 8 and Table 9 were obtained from The Institute of Genetic research (TIGR). The identity given in Table 9 is on a nucleotide level. The accession number given starting with ‘TC’ identifies the sequence as found through TIGR. In case of partial nucleic acids, it would be well within the capabilities of a person skilled in the art to obtain the full length sequence (or at least a sufficient length of sequence for performing the methods of the invention).

TABLE 8
Examples of putative SIK orthologues and paralogues

| # | TC | Putative function |
|---|---|---|
| 1 | Arabidopsis\|TC272322 | (Q9C9Y3) Hypothetical protein F17O14.23 |
| 2 | Barley\|TC134680 | (Q8RUD7) Similar to protein kinase AtSIK (P0485B12.21 protein) |
| 3 | Cotton\|TC30779 | (Q9C9Y3) Hypothetical protein F17O14.23 |
| 4 | Grape\|TC43027 | (Q94CI5) Protein kinase AtSIK |
| 5 | L. japonicus\|TC17767 | (Q94CI5) Protein kinase AtSIK |
| 6 | Lettuce\|TC15801 | protein kinase AtSIK |
| 7 | Maize\|TC255367 | (Q8RUD7) Similar to protein kinase AtSIK (P0485B12.21 protein) |
| 8 | Maize\|TC272965 | (Q8RUD7) Similar to protein kinase AtSIK (P0485B12.21 protein) |
| 9 | Medicago\|TC96175 | (Q9C9Y3) Hypothetical protein F17O14.23 |
| 10 | Pepper\|TC5595 | (Q94CI5) Protein kinase AtSIK |
| 11 | Potato\|TC117743 | Protein kinase domain putative |
| 12 | Rice\|TC268277 | (Q8RUD7) Similar to protein kinase AtSIK (P0485B12.21 protein) |
| 13 | S. officinarum\|TC67974 | (Q8RUD7) Similar to protein kinase AtSIK (P0485B12.21 protein) |
| 14 | Sorghum\|TC103780 | (Q8RUD7) Similar to protein kinase AtSIK (P0485B12.21 protein) |
| 15 | Soybean\|TC229774 | (Q94CI5) Protein kinase AtSIK |
| 16 | Tomato\|TC158378 | 68416.m01018 protein kinase family protein contains protein kinase |
| | | domain Pfam:PF00069 |
| 17 | Tomato\|TC166426 | 68416.m01018 protein kinase family protein contains protein kinase |
| | | domain Pfam:PF00069 |
| 18 | Wheat\|TC257477 | (Q8RUD7) Similar to protein kinase AtSIK (P0485B12.21 protein) |

TABLE 9
Examples of putative SIK orthologues and paralogues.

| | | | | | Recip. |
|---|---|---|---|---|---|
| Sequence1 | Sequence2 | % Identity | Match length | p-value | best hits |
| Barley\|TC134680 | Arabidopsis\|TC272322 | 63 | 1030 | 6.80E−66 | * |
| Cotton\|TC30779 | Arabidopsis\|TC272322 | 71 | 1008 | 9.40E−103 | * |
| Cotton\|TC30779 | Barley\|TC134680 | 68 | 971 | 8.30E−80 | * |
| Grape\|TC43027 | Arabidopsis\|TC272322 | 60 | 619 | 4.30E−25 | * |
| Grape\|TC43027 | Cotton\|TC30779 | 80 | 245 | 5.60E−29 | * |
| Grape\|TC43027 | Maize\|TC272965 | 58 | 483 | 3.20E−13 | * |
| Grape\|TC43027 | Rice\|TC268277 | 66 | 318 | 3.50E−19 | * |
| Grape\|TC43027 | S. officinarum\|TC67974 | 63 | 372 | 2.40E−17 | * |
| Grape\|TC43027 | Soybean\|TC229774 | 77 | 276 | 4.60E−30 | * |
| Grape\|TC43027 | Tomato\|TC158378 | 69 | 420 | 9.20E−33 | * |
| Grape\|TC43027 | Tomato\|TC166426 | 75 | 241 | 1.80E−23 | |
| L. japonicus\|TC17767 | Arabidopsis\|TC272322 | 72 | 659 | 1.30E−64 | * |
| L. japonicus\|TC17767 | Barley\|TC134680 | 67 | 659 | 4.40E−53 | * |
| L. japonicus\|TC17767 | Cotton\|TC30779 | 80 | 654 | 9.20E−89 | * |
| Lettuce\|TC15801 | Arabidopsis\|TC272322 | 69 | 529 | 8.90E−44 | * |
| Lettuce\|TC15801 | Cotton\|TC30779 | 77 | 501 | 1.20E−58 | * |
| Lettuce\|TC15801 | L. japonicus\|TC17767 | 75 | 412 | 2.20E−45 | * |
| Maize\|TC255367 | Arabidopsis\|TC272322 | 62 | 528 | 5.50E−24 | * |
| Maize\|TC255367 | Barley\|TC134680 | 81 | 451 | 1.10E−60 | * |
| Maize\|TC255367 | Cotton\|TC30779 | 63 | 738 | 6.90E−44 | * |
| Maize\|TC255367 | L. japonicus\|TC17767 | 66 | 366 | 2.20E−24 | * |
| Maize\|TC255367 | Lettuce\|TC15801 | 65 | 455 | 4.10E−30 | * |
| Maize\|TC272965 | Barley\|TC134680 | 68 | 623 | 2.90E−43 | |
| Medicago\|TC96175 | Arabidopsis\|TC272322 | 67 | 1245 | 2.70E−102 | * |
| Medicago\|TC96175 | Barley\|TC134680 | 65 | 1069 | 2.50E−75 | * |
| Medicago\|TC96175 | Cotton\|TC30779 | 76 | 1041 | 2.20E−125 | * |
| Medicago\|TC96175 | L. japonicus\|TC17767 | 89 | 666 | 3.50E−114 | * |
| Medicago\|TC96175 | Lettuce\|TC15801 | 73 | 504 | 1.00E−51 | * |
| Medicago\|TC96175 | Maize\|TC255367 | 62 | 813 | 3.60E−41 | * |
| Pepper\|TC5595 | Arabidopsis\|TC272322 | 66 | 696 | 6.40E−49 | * |
| Pepper\|TC5595 | Barley\|TC134680 | 66 | 510 | 2.90E−38 | * |
| Pepper\|TC5595 | Cotton\|TC30779 | 76 | 553 | 1.60E−66 | * |
| Pepper\|TC5595 | L. japonicus\|TC17767 | 75 | 474 | 4.50E−53 | * |
| Pepper\|TC5595 | Lettuce\|TC15801 | 75 | 541 | 3.30E−60 | * |
| Pepper\|TC5595 | Maize\|TC255367 | 66 | 462 | 1.00E−29 | * |
| Pepper\|TC5595 | Medicago\|TC96175 | 67 | 800 | 1.30E−60 | * |
| Potato\|TC117743 | Arabidopsis\|TC272322 | 64 | 1082 | 8.80E−65 | * |
| Potato\|TC117743 | Barley\|TC134680 | 66 | 565 | 1.30E−39 | * |
| Potato\|TC117743 | Cotton\|TC30779 | 77 | 587 | 1.80E−70 | * |
| Potato\|TC117743 | L. japonicus\|TC17767 | 75 | 496 | 3.60E−54 | * |
| Potato\|TC117743 | Lettuce\|TC15801 | 77 | 543 | 2.30E−65 | * |
| Potato\|TC117743 | Maize\|TC255367 | 67 | 444 | 1.30E−33 | * |
| Potato\|TC117743 | Medicago\|TC96175 | 68 | 804 | 4.20E−64 | * |
| Potato\|TC117743 | Pepper\|TC5595 | 82 | 826 | 1.60E−121 | * |
| Rice\|TC268277 | Arabidopsis\|TC272322 | 63 | 1019 | 3.10E−66 | * |
| Rice\|TC268277 | Barley\|TC134680 | 78 | 1371 | 5.70E−179 | * |
| Rice\|TC268277 | Cotton\|TC30779 | 64 | 1436 | 3.40E−101 | * |
| Rice\|TC268277 | L. japonicus\|TC17767 | 70 | 656 | 1.90E−61 | * |
| Rice\|TC268277 | Maize\|TC255367 | 81 | 860 | 4.50E−121 | * |
| Rice\|TC268277 | Maize\|TC272965 | 74 | 646 | 4.00E−68 | |
| Rice\|TC268277 | Medicago\|TC96175 | 63 | 1684 | 3.00E−104 | * |
| Rice\|TC268277 | Pepper\|TC5595 | 65 | 600 | 5.50E−40 | * |
| Rice\|TC268277 | Potato\|TC117743 | 65 | 691 | 3.80E−45 | * |
| S. officinarum\|TC67974 | Arabidopsis\|TC272322 | 63 | 938 | 1.50E−59 | * |
| S. officinarum\|TC67974 | Barley\|TC134680 | 76 | 1294 | 2.60E−151 | * |
| S. officinarum\|TC67974 | Cotton\|TC30779 | 66 | 876 | 5.10E−70 | * |
| S. officinarum\|TC67974 | L. japonicus\|TC17767 | 69 | 656 | 4.70E−57 | * |
| S. officinarum\|TC67974 | Lettuce\|TC15801 | 66 | 390 | 4.70E−28 | * |
| S. officinarum\|TC67974 | Maize\|TC255367 | 96 | 367 | 2.80E−72 | |
| S. officinarum\|TC67974 | Maize\|TC272965 | 90 | 649 | 2.20E−112 | * |
| S. officinarum\|TC67974 | Medicago\|TC96175 | 64 | 1140 | 7.80E−75 | * |
| S. officinarum\|TC67974 | Pepper\|TC5595 | 66 | 471 | 1.80E−33 | * |
| S. officinarum\|TC67974 | Potato\|TC117743 | 67 | 460 | 1.00E−35 | * |
| S. officinarum\|TC67974 | Rice\|TC268277 | 82 | 1338 | 1.20E−194 | * |
| S. officinarum\|TC67974 | Sorghum\|TC103780 | 95 | 1359 | 8.70E−277 | * |
| S. officinarum\|TC67974 | Soybean\|TC229774 | 70 | 750 | 1.70E−67 | * |
| Sorghum\|TC103780 | Arabidopsis\|TC272322 | 63 | 1057 | 1.40E−65 | * |
| Sorghum\|TC103780 | Barley\|TC134680 | 75 | 1421 | 5.10E−163 | * |
| Sorghum\|TC103780 | Cotton\|TC30779 | 64 | 1333 | 8.60E−91 | * |
| Sorghum\|TC103780 | L. japonicus\|TC17767 | 69 | 656 | 6.40E−57 | * |
| Sorghum\|TC103780 | Lettuce\|TC15801 | 64 | 493 | 3.70E−30 | * |
| Sorghum\|TC103780 | Maize\|TC255367 | 92 | 948 | 1.70E−180 | * |
| Sorghum\|TC103780 | Maize\|TC272965 | 89 | 651 | 2.40E−110 | |
| Sorghum\|TC103780 | Medicago\|TC96175 | 62 | 1653 | 5.10E−96 | * |
| Sorghum\|TC103780 | Pepper\|TC5595 | 64 | 580 | 2.60E−36 | * |
| Sorghum\|TC103780 | Potato\|TC117743 | 65 | 602 | 6.50E−39 | * |
| Sorghum\|TC103780 | Rice\|TC268277 | 80 | 1852 | 1.40E−260 | * |
| Soybean\|TC229774 | Arabidopsis\|TC272322 | 72 | 757 | 1.10E−77 | * |
| Soybean\|TC229774 | Barley\|TC134680 | 69 | 756 | 5.70E−67 | * |
| Soybean\|TC229774 | Cotton\|TC30F779 | 78 | 737 | 3.40E−96 | * |
| Soybean\|TC229774 | L. japonicus\|TC17767 | 90 | 495 | 4.10E−87 | * |
| Soybean\|TC229774 | Lettuce\|TC15801 | 77 | 249 | 1.90E−26 | * |
| Soybean\|TC229774 | Maize\|TC255367 | 71 | 203 | 2.00E−15 | * |
| Soybean\|TC229774 | Medicago\|TC96175 | 87 | 717 | 2.10E−118 | * |
| Soybean\|TC229774 | Pepper\|TC5595 | 76 | 308 | 1.50E−32 | * |
| Soybean\|TC229774 | Potato\|TC117743 | 76 | 332 | 1.80E−35 | * |
| Soybean\|TC229774 | Rice\|TC268277 | 71 | 744 | 4.20E−74 | * |
| Soybean\|TC229774 | Sorghum\|TC103780 | 69 | 757 | 1.30E−65 | * |
| Tomato\|TC158378 | Arabidopsis\|TC272322 | 71 | 686 | 3.10E−64 | * |
| Tomato\|TC158378 | Barley\|TC134680 | 65 | 907 | 8.80E−63 | * |
| Tomato\|TC158378 | Cotton\|TC30779 | 78 | 669 | 2.90E−86 | * |
| Tomato\|TC158378 | L. japonicus\|TC17767 | 78 | 427 | 1.70E−52 | * |
| Tomato\|TC158378 | Lettuce\|TC15801 | 81 | 181 | 3.90E−21 | |
| Tomato\|TC158378 | Maize\|TC272965 | 60 | 428 | 4.80E−14 | * |
| Tomato\|TC158378 | Medicago\|TC96175 | 68 | 908 | 4.60E−76 | * |
| Tomato\|TC158378 | Pepper\|TC5595 | 84 | 243 | 6.40E−34 | |
| Tomato\|TC158378 | Potato\|TC117743 | 96 | 264 | 8.90E−50 | * |
| Tomato\|TC158378 | Rice\|TC268277 | 66 | 897 | 1.70E−64 | * |
| Tomato\|TC158378 | S. officinarum\|TC67974 | 65 | 906 | 2.40E−60 | * |
| Tomato\|TC158378 | Soybean\|TC229774 | 74 | 700 | 4.80E−78 | * |
| Tomato\|TC166426 | Arabidopsis\|TC272322 | 70 | 675 | 1.80E−62 | |
| Tomato\|TC166426 | Barley\|TC134680 | 67 | 680 | 1.40E−54 | |
| Tomato\|TC166426 | Cotton\|TC30779 | 77 | 679 | 3.80E−85 | |
| Tomato\|TC166426 | L. japonicus\|TC17767 | 77 | 440 | 1.30E−50 | |
| Tomato\|TC166426 | Lettuce\|TC15801 | 81 | 193 | 6.50E−23 | * |
| Tomato\|TC166426 | Medicago\|TC96175 | 73 | 675 | 1.30E−69 | |
| Tomato\|TC166426 | Pepper\|TC5595 | 95 | 255 | 1.10E−46 | * |
| Tomato\|TC166426 | Potato\|TC117743 | 85 | 276 | 2.40E−39 | |
| Tomato\|TC166426 | Rice\|TC268277 | 67 | 680 | 2.70E−55 | |
| Tomato\|TC166426 | S. officinarum\|TC67974 | 67 | 680 | 4.90E−53 | |
| Tomato\|TC166426 | Sorghum\|TC103780 | 67 | 680 | 1.60E−53 | * |
| Tomato\|TC166426 | Soybean\|TC229774 | 73 | 680 | 2.30E−72 | |
| Wheat\|TC257477 | Barley\|TC134680 | 91 | 672 | 7.00E−119 | * |
| Wheat\|TC257477 | Maize\|TC272965 | 69 | 639 | 2.80E−49 | * |
| Wheat\|TC257477 | Rice\|TC268277 | 68 | 647 | 4.10E−47 | * |
| Wheat\|TC257477 | S. officinarum\|TC67974 | 67 | 648 | 4.10E−46 | * |
| Wheat\|TC257477 | Sorghum\|TC103780 | 69 | 648 | 4.20E−49 | * |
| Wheat\|TC257477 | Tomato\|TC158378 | 61 | 441 | 1.20E−18 | * |

[0524] Orthologous and paralogous SIK polypeptides may readily be found, and nucleic acids encoding such orthologues and paralogues would be useful in performing the methods of the invention.

[0525] Orthologues and paralogues may easily be found by performing a so-called reciprocal blast search. Typically this involves a first BLAST involving BLASTing a query sequence (for example, SEQ ID NO: 209 or SEQ ID NO: 210) against any sequence database, such as the publicly available NCBI database which may be found at: ncbi.nlm.nih.gov. BLASTN or TBLASTX (using standard default values) are generally used when starting from a nucleotide sequence, and BLASTP or TBLASTN (using standard default values) when starting from a protein sequence. The BLAST results may optionally be filtered. The full-length sequences of either the filtered results or non-filtered results are then BLASTed back (second BLAST) against sequences from the organism from which the query sequence is derived (where the query sequence is SEQ ID NO: 209 or SEQ ID NO: 210, the second BLAST would therefore be against Oryza sequences). The results of the first and second BLASTs are then compared. A paralogue is identified if a high-ranking hit from the first blast is from the same species as from which the query sequence is derived, a BLAST back then ideally results in the query sequence being among the highest hits; an orthologue is identified if a high-ranking hit in the first BLAST is not from the same species as from which the query sequence is derived, and preferably results upon BLAST back in the query sequence being among the highest hits.

[0526] High-ranking hits are those having a low E-value. The lower the E-value, the more significant the score (or in other words the lower the chance that the hit was found by chance). Computation of the E-value is well known in the art. In addition to E-values, comparisons are also scored by percentage identity. Percentage identity refers to the number of identical nucleotides (or amino acids) between the two compared nucleic acid (or polypeptide) sequences over a particular length. Preferably the score is greater than 50, more preferably greater than 100; and preferably the E-value is less than e-5, more preferably less than e-6. In the case of large families, ClustalW may be used, followed by a neighbour joining tree, to help visualize clustering of related genes and to identify orthologues and paralogues.

[0527] Orthologues and paralogues may also be identified using the BLAST procedure described below. Homologues (or homologous proteins, encompassing orthologues and paralogues) may readily be identified using routine techniques well known in the art, such as by sequence alignment. Methods for the alignment of sequences for comparison are well known in the art, such methods include GAP, BESTFIT, BLAST, FASTA and TFASTA. GAP uses the algorithm of Needleman and Wunsch ((1970) J Mol Biol 48: 443-453) to find the alignment of two complete sequences that maximizes the number of matches and minimizes the number of gaps. The BLAST algorithm (Altschul et al. (1990) J Mol Biol 215: 403-410) calculates percent sequence identity and performs a statistical analysis of the similarity between the two sequences. The software for performing BLAST analysis is publicly available through the National Centre for Biotechnology Information. Homologues may readily be identified using, for example, the ClustalW multiple sequence alignment algorithm (version 1.83), with the default pairwise alignment parameters, and a scoring method in percentage. Global percentages of similarity and identity may also be determined using one of the methods available in the MatGAT software package (Campanella et al., BMC Bioinformatics. 4, 29, 2003). Minor manual editing may be performed to optimise alignment between conserved motifs, as would be apparent to a person skilled in the art. Furthermore, instead of using full-length sequences for the identification of homologues, specific domains may be used as well. The sequence identity values, which are indicated below as a percentage were determined over the entire SIK nucleic acid or amino acid sequence using the programs mentioned above using the default parameters.

[0528] Preferably, the SIK polypeptides encoded by the SIK-encoding nucleic acids useful in the methods of the present invention have, in increasing order of preference, at least 40%, 41%, 42%, 43%, 44%, 45%, 46%, 47%, 48%, 49%, 50%, 51%, 52%, 53%, 54%, 55%, 56%, 57%, 58%, 59%, 60%, 61%, 62%, 63%, 64%, 65%, 66%, 67%, 68%, 69%, 70%, 71%, 72%, 73%, 74%, 75%, 76%, 77%, 78%, 79%, 80%, 81%, 82%, 83%, 84%, 85%, 86%, 87%, 88%, 89%, 90%, 91%, 92%, 93%, 94%, 95%, 96%, 97%, 98%, 99% identity to the polypeptide of SEQ ID NO: 210.

[0529] Alternatively, the sequence identity among homologues may be determined using a specific domain. Any given domain may be identified and delineated using the databases and tools for protein identification listed above, and/or methods for the alignment of sequences for comparison. In some instances, default parameters may be adjusted to modify the stringency of the search. For example using BLAST, the statistical significance threshold (called “expect” value) for reporting matches against database sequences may be increased to show less stringent matches. In this way, short nearly exact matches may be identified.

[0530] The SIK polypeptides may be identifiable by the presence of an ATP-binding region, a serine threonine kinase active site signature, an N-terminal serine-rich domain and one or more myristoylation sites. The terms “domain” and “motif” are defined above. Specialist databases exist for the identification of domains, such as SMART (Schultz et al. (1998) Proc. Natl. Acad. Sci. USA 95, 5857-5864; Letunic et al. (2002) Nucleic Acids Res 30, 242-244), InterPro (Mulder et al., (2003) Nucl. Acids. Res. 31, 315-318), Prosite (Bucher and Bairoch (1994), A generalized profile syntax for biomolecular sequences motifs and its function in automatic sequence interpretation. (In) ISMB-94; Proceedings 2nd International Conference on Intelligent Systems for Molecular Biology. Altman R., Brutlag D., Karp P., Lathrop R., Searls D., Eds., pp. 53-61, AAAI Press, Menlo Park; Hulo et al., Nucl. Acids. Res. 32:D134-D137, (2004)) or Pfam (Bateman et al., Nucleic Acids Research 30(1): 276-280 (2002)). A set of tools for in silico analysis of protein sequences is available on the ExPASY proteomics server (hosted by the Swiss Institute of Bioinformatics (Gasteiger et al., ExPASy: the proteomics server for in-depth protein knowledge and analysis, Nucleic Acids Res. 31:3784-3788 (2003)). However, the various domains may also easily be identified upon sequence alignment of a putative SIK polypeptide with SIK polypeptides known in the art.

[0531] Also useful in the methods of the invention are nucleic acids encoding homologues of a SIK polypeptide represented by SEQ ID NO: 210 or orthologues or paralogues thereof as defined above.

[0532] Also useful in the methods of the invention are nucleic acids encoding derivatives of SEQ ID NO: 210 or nucleic acids encoding derivatives of orthologues, paralogues or homologues of SEQ ID NO: 210.

[0533] Nucleic acids encoding SIK polypeptides defined herein need not be full-length nucleic acids, since performance of the methods of the invention does not rely on the use of full length nucleic acid sequences. Examples of nucleic acids suitable for use in performing the methods of the invention include the nucleic acid sequences given in Table 8 and Table 9, but are not limited to those sequences. Nucleic acid variants may also be useful in practising the methods of the invention. Examples of such nucleic acid variants include portions of nucleic acids encoding a SIK polypeptide as defined herein, splice variants of nucleic acids encoding a SIK polypeptide as defined herein, allelic variants of nucleic acids encoding a SIK polypeptide as defined herein and variants of nucleic acids encoding a SIK polypeptide as defined herein that are obtained by gene shuffling. The terms portion, splice variant, allelic variant and gene shuffling are as described herein.

[0534] According to the present invention, there is provided a method for increasing the number of flowers per plant relative to control plants, comprising introducing and expressing in a plant a portion of any one of the nucleic acid sequences given in Table 8 or Table 9, or a portion of a nucleic acid encoding an orthologue, paralogue or homologue of any of the amino acid sequences given in Table 8 or Table 9.

[0535] Portions useful in the methods of the invention, encode a polypeptide having substantially the same biological activity as the SIK polypeptide represented by any of the amino acid sequences given in Table 8 or Table 9. Preferably, the portion is a portion of any one of the nucleic acids given in Table 8 or Table 9, or a portion of any one of the nucleic acids sequences represented by SEQ ID NO: 213 to 225. The portion is typically at least 300 consecutive nucleotides in length, preferably at least 400 consecutive nucleotides in length, more preferably at least 500 consecutive nucleotides in length, the consecutive nucleotides being of any one of the nucleic acid sequences given in Table 8 or Table 9 or any one of the nucleic acids sequences represented by SEQ ID NO: 213 to 225. Most preferably the portion is a portion of the nucleic acid of SEQ ID NO: 209. Preferably, the portion encodes an amino acid sequence comprising any one or more of an ATP-binding region, a serine threonine kinase active site signature, an N-terminal serine-rich domain, one or more myristoylation sites and kinase activity.

[0536] A portion of a nucleic acid encoding a SIK polypeptide as defined herein may be prepared, for example, by making one or more deletions to the nucleic acid. The portions may be used in isolated form or they may be fused to other coding (or non coding) sequences in order to, for example, produce a protein that combines several activities. When fused to other coding sequences, the resultant polypeptide produced upon translation may be bigger than that predicted for the portion.

[0537] Another nucleic acid variant useful in the methods of the invention is a nucleic acid capable of hybridising, under reduced stringency conditions, preferably under stringent conditions, with a nucleic acid encoding a SIK polypeptide as defined herein, or with a portion as defined herein.

[0538] Hybridising sequences useful in the methods of the invention, encode a polypeptide having substantially the same biological activity as the SIK polypeptide represented by any of the amino acid sequences given in Table 8 or Table 9. The hybridising sequence is typically at least 300 consecutive nucleotides in length, preferably at least 400 consecutive nucleotides in length, more preferably at least 500 consecutive nucleotides in length, the consecutive nucleotides being of any one of the nucleic acid sequences given in Table 8 or Table 9. Preferably, the hybridising sequence is one that is capable of hybridising to any of the nucleic acids given in Table 8 or Table 9, or to a portion of any of these sequences, a portion being as defined above. Most preferably, the hybridising sequence is capable of hybridising to a nucleic acid as represented by SEQ ID NO: 209 or to a portion thereof. Preferably, the hybridising sequence encodes an amino acid sequence comprising any one or more of an ATP-binding region, a serine threonine kinase active site signature, an N-terminal serine-rich domain, one or more myristoylation sites and kinase activity.

[0539] According to the present invention, there is provided a method for increasing the number of flowers per plant, comprising introducing and expressing in a plant a nucleic acid capable of hybridizing to any one of the nucleic acids given in Table 8 or Table 9 or any one of the nucleic acids sequences represented by SEQ ID NO: 213 to 225, or comprising introducing and expressing in a plant a nucleic acid capable of hybridising to a nucleic acid encoding an orthologue, paralogue or homologue of any of the nucleic acid sequences given in Table 1 or Table 2 or any one of the nucleic acids sequences represented by SEQ ID NO: 213 to 225.

[0540] Another nucleic acid variant useful in the methods of the invention is a splice variant encoding a SIK polypeptide as defined hereinabove, the term “splice variant” being as defined above.

[0541] According to the present invention, there is provided a method for increasing the number of flowers per plant, comprising introducing and expressing in a plant a splice variant of any one of the nucleic acid sequences given in Table 8 or Table 9 or a splice variant of any one of the nucleic acids represented by SEQ ID NO: 213 to 225, or a splice variant of a nucleic acid encoding an orthologue, paralogue or homologue of any of the amino acid sequences given in Table 8 or Table 9 or any one of the nucleic acids sequences represented by SEQ ID NO: 213 to 225.

[0542] Preferred splice variants are splice variants of a nucleic acid represented by SEQ ID NO: 209 or a splice variant encoding an orthologue or paralogue of SEQ ID NO: 210. Preferably, the amino acid encoded by the splice variant comprises any one or more of an ATP-binding region, a serine threonine kinase active site signature, an N-terminal serine-rich domain, one or more myristoylation sites and kinase activity.

[0543] Another nucleic acid variant useful in performing the methods of the invention is an allelic variant of a nucleic acid encoding a SIK polypeptide as defined hereinabove.

[0544] According to the present invention, there is provided a method for increasing the number of flowers per plant, comprising introducing and expressing in a plant an allelic variant of any one of the nucleic acids given in Table 8 or Table 9 or of any one of the nucleic acid sequences represented by SEQ ID NO: 213 to 225, or comprising introducing and expressing in a plant an allelic variant of a nucleic acid encoding an orthologue, paralogue or homologue of any of the amino acid sequences given in Table 8 or Table 9 or of any one of the nucleic acids sequences represented by SEQ ID NO: 213 to 225.

[0545] Preferably, the allelic variant is an allelic variant of SEQ ID NO: 209 or an allelic variant of a nucleic acid encoding an orthologue or paralogue or homologue of SEQ ID NO: 210. Preferably, the amino acid encoded by the allelic variant comprises any one or more of an ATP-binding region, a serine threonine kinase active site signature, an N-terminal serine-rich domain, one or more myristoylation sites and kinase activity.

[0546] A further nucleic acid variant useful in the methods of the invention is a nucleic acid variant obtained by gene shuffling. Gene shuffling or directed evolution may also be used to generate variants of nucleic acids encoding SIK polypeptides.

[0547] According to the present invention, there is provided a method for increasing the number of flowers per plant, comprising introducing and expressing in a plant a variant of any one of the nucleic acid sequences given in Table 8 or Table 9, or of any one of the nucleic acids sequences represented by SEQ ID NO: 213 to 225, or comprising introducing and expressing in a plant a variant of a nucleic acid encoding an orthologue, paralogue or homologue of any of the amino acid sequences given in Table 8 or Table 9 or of any one of the nucleic acids sequences represented by SEQ ID NO: 213 to 225, which variant nucleic acid is obtained by gene shuffling. Preferably, the variant nucleic acid obtained by gene shuffling encodes an amino acid comprising any one or more of an ATP-binding region, a serine threonine kinase active site signature, an N-terminal serine-rich domain, one or more myristoylation sites and kinase activity.

[0548] Furthermore, nucleic acid variants may also be obtained by site-directed mutagenesis. Several methods are available to achieve site-directed mutagenesis, the most common being PCR based methods (current protocols in molecular biology. Wiley Eds.

[0549] SIK nucleic acids encoding SIK-like polypeptides may be derived from any natural or artificial source. The SIK nucleic acid may be modified from its native form in composition and/or genomic environment through deliberate human manipulation. Preferably the SIK-encoding nucleic acid is from a plant, further preferably from a monocotyledonous plant, more preferably from the family of Poaceae, most preferably the nucleic acid is from Oryza sativa.

[0550] Any reference herein to a SIK polypeptide is therefore taken to mean a SIK polypeptide as defined above. Any SIK nucleic acid encoding such a SIK polypeptide is suitable for use in performing the methods of the invention to increase the number of flowers per plant.

[0551] The present invention also encompasses plants or parts thereof (including seeds) obtainable by the methods according to the present invention. The plants or parts thereof comprise a nucleic acid transgene encoding a SIK polypeptide as defined above.

[0552] The invention also provides genetic constructs and vectors to facilitate introduction and/or expression of the SIK nucleic acid sequences useful in the methods according to the invention, in a plant.

[0553] Therefore, there is provided a gene construct comprising:
[0554] (i) a SIK nucleic acid as defined hereinabove or a SIK-encoding nucleic acid;
[0555] (ii) one or more control sequences operably linked to the SIK nucleic acid of (i).

[0556] A preferred construct in the case of reduction or substantial elimination of a SIK nucleic acid to give increased thousand kernel weight, increased harvest index and increased fill rate is one comprising an inverted repeat of a SIK nucleic acid, preferably capable of forming a hairpin structure, which inverted repeat is under the control of a constitutive promoter.

[0557] Constructs useful in the methods according to the present invention may be constructed using recombinant DNA technology well known to persons skilled in the art. The gene constructs may be inserted into vectors, which may be commercially available, suitable for transforming into plants and suitable for transcribing of the gene of interest in the transformed cells. The invention therefore provides use of a gene construct as defined hereinabove in the methods of the invention.

[0558] Plants are transformed with a vector comprising the sequence of interest. The skilled artisan is well aware of the genetic elements that must be present on the vector in order to successfully transform, select and propagate host cells containing the sequence of interest. The sequence of interest is operably linked to one or more control sequences (at least to a promoter). The terms “regulatory element”, “control sequence” and “promoter” are all used interchangeably herein and are defined above.

[0559] Advantageously, any type of promoter may be used in the methods of the present invention. The term “promoter” refers to a nucleic acid control sequence located upstream from the transcriptional start of a gene and which is involved in recognising and binding of RNA polymerase and other proteins, thereby directing transcription of an operably linked nucleic acid. The promoter may be a constitutive promoter. Alternatively, the promoter may be an inducible promoter. Additionally or alternatively, the promoter may be a tissue-specific promoter. Promoters able to initiate transcription in certain tissues only are referred to herein as “tissue-specific”, similarly, promoters able to initiate transcription in certain cells only are referred to herein as “cell-specific”.

[0560] Preferably, the nucleic acid sequence is operably linked to a constitutive promoter. Preferably the promoter is derived from a plant, more preferably the promoter is from a monocotyledonous plant if a monocotyledonous plant is to be transformed. Further preferably, the constitutive promoter is a GOS2 promoter that is represented by a nucleic acid sequence substantially similar to SEQ ID NO: 56 or 226. Most preferably the GOS2 promoter is as represented by SEQ ID NO: 56 or 226. It should be clear that the applicability of the present invention is not restricted to the SIK nucleic acid sequence as represented by SEQ ID NO: 209, nor is the applicability of the invention restricted to expression of a SIK nucleic acid sequence when driven by a GOS2 promoter. Examples of other constitutive promoters that may also be used to drive expression of a SIK nucleic acid sequence are shown above.

[0561] Optionally, one or more terminator sequences may be used in the construct introduced into a plant. Additional regulatory elements may include transcriptional as well as translational enhancers. Those skilled in the art will be aware of terminator and enhancer sequences that may be suitable for use in performing the invention. An intron sequence may also be added to the 5′ untranslated region (UTR) or in the coding sequence to increase the amount of the mature message that accumulates in the cytosol, as described in the definitions section. Other control sequences (besides promoter, enhancer, silencer, intron sequences, 3′UTR and/or 5′UTR regions) may be protein and/or RNA stabilizing elements. Such sequences would be known or may readily be obtained by a person skilled in the art.

[0562] The genetic constructs of the invention may further include an origin of replication sequence that is required for maintenance and/or replication in a specific cell type. One example is when a genetic construct is required to be maintained in a bacterial cell as an episomal genetic element (e.g. plasmid or cosmid molecule). Preferred origins of replication include, but are not limited to, the f1-ori and colE1.

[0563] For the detection of the successful transfer of the nucleic acid sequences as used in the methods of the invention and/or selection of transgenic plants comprising these nucleic acids, it is advantageous to use marker genes (or reporter genes). Therefore, the genetic construct may optionally comprise a selectable marker gene. Selectable markers are described in more detail in the “definitions” section herein. The marker genes may be removed or excised from the transgenic cell once they are no longer needed. Techniques for marker removal are known in the art, useful techniques are described above in the definitions section.

[0564] The expression of a SIK nucleic acid or SIK polypeptide may also be modulated by introducing a genetic modification, within the locus of a SIK gene. The locus of a gene as defined herein is taken to mean a genomic region, which includes the gene of interest and 10 kb up- or down stream of the coding region.

[0565] The genetic modification may be introduced, for example, by any one (or more) of the following methods: T-DNA tagging, TILLING and homologous recombination. Following introduction of the genetic modification, there follows a step of selecting for suitable modulated expression.

[0566] The methods of the invention are advantageously applicable to any plant. Plants that are particularly useful in the methods of the invention include all plants which belong to the superfamily Viridiplantae, in particular monocotyledonous and dicotyledonous plants including fodder or forage legumes, ornamental plants, food crops, trees or shrubs. According to a preferred embodiment of the present invention, the plant is a crop plant.

[0567] Examples of crop plants include soybean, sunflower, canola, alfalfa, rapeseed, cotton, tomato, potato and tobacco. Further preferably, the plant is a monocotyledonous plant. Examples of monocotyledonous plants include sugarcane. More preferably the plant is a cereal. Examples of cereals include rice, maize, wheat, barley, millet, rye, triticale, sorghum and oats.

[0568] Other advantageous plants are selected from the group consisting of Asteraceae such as the genera Helianthus, Tagetes e.g. the species Helianthus annus [sunflower], Tagetes lucida, Tagetes erecta or Tagetes tenuifolia [Marigold], Brassicaceae such as the genera Brassica, Arabadopsis e.g. the species Brassica napus, Brassica rapa ssp. [canola, oilseed rape, turnip rape] or Arabidopsis thaliana. Fabaceae such as the genera Glycine e.g. the species Glycine max, Soja hispida or Soja max [soybean]. Linaceae such as the genera Linum e.g. the species Linum usitatissimum, [flax, linseed]; Poaceae such as the genera Hordeum, Secale, Avena, Sorghum, Oryza, Zea, Triticum e.g. the species Hordeum vulgare [barley]; Secale cereale [rye], Avena sativa, Avena fatua, Avena byzantina, Avena fatua var. sativa, Avena hybrida [oat], Sorghum bicolor [Sorghum, millet], Oryza sativa, Oryza latifolia [rice], Zea mays [corn, maize] Triticum aestivum, Triticum durum, Triticum turgidum, Triticum hybernum, Triticum macha, Triticum sativum or Triticum vulgare [wheat, bread wheat, common wheat]; Solanaceae such as the genera Solanum, Lycopersicon e.g. the species Solanum tuberosum [potato], Lycopersicon esculentum, Lycopersicon lycopersicum., Lycopersicon pyriforme, Solanum integrifolium or Solanum lycopersicum [tomato].

[0569] The present invention also encompasses plants obtainable by the methods according to the present invention. The present invention therefore provides plants, plant parts or plant cells thereof obtainable by the method according to the present invention, which plants or parts or cells thereof comprise a SIK nucleic acid transgene (which may encode a SIK polypeptide as defined above).

[0570] The invention furthermore provides a method for the production of transgenic plants having the various improved yield-related traits mentioned above, comprising introduction and expression in a plant SIK nucleic acid as defined.

[0571] Host plants for the nucleic acids or the vector used in the method according to the invention, the expression cassette or construct or vector are, in principle, advantageously all plants, which are capable of synthesizing the polypeptides used in the inventive method.

[0572] More specifically, the present invention provides a method for the production of transgenic plants having various improved yield-related traits relative to control plants, which method comprises:
[0573] (i) introducing and expressing a SIK nucleic acid in a plant cell; and
[0574] (ii) cultivating the plant cell under conditions promoting plant growth and development;
[0575] (iii) obtaining plants having increased number of flowers per plant.

[0576] Also provided is a method for the production of transgenic plants having various improved yield-related traits relative to control plants, which method comprises:
[0577] (i) introducing into a plant cell a construct for downregulating SIK gene expression; and
[0578] (ii) cultivating the plant cell under conditions promoting plant growth and development;
[0579] (iii) obtaining plants having one or more of increased thousand kernel weight, increased harvest index and increased fill rate.

[0580] The nucleic acid may be introduced directly into a plant cell or into the plant itself (including introduction into a tissue, organ or any other part of a plant). According to a preferred feature of the present invention, the nucleic acid is preferably introduced into a plant by transformation. Further preferably the construct for downregulating SIK gene expression and introduced into the plant cell or plant comprise an inverted repeat of the SIK nucleic acid or a part thereof.

[0581] Generally after transformation, plant cells or cell groupings are selected for the presence of one or more markers which are encoded by plant-expressible genes co-transferred with the gene of interest, following which the transformed material is regenerated into a whole plant.

[0582] As mentioned Agrobacteria transformed with an expression vector according to the invention may also be used in the manner known per se for the transformation of plants such as experimental plants like Arabidopsis or crop plants, such as, for example, cereals, maize, oats, rye, barley, wheat, soya, rice, cotton, sugarbeet, canola, sunflower, flax, hemp, potato, tobacco, tomato, carrot, bell peppers, oilseed rape, tapioca, cassava, arrow root, tagetes, alfalfa, lettuce and the various tree, nut, and grapevine species, in particular oil-containing crop plants such as soya, peanut, castor-oil plant, sunflower, maize, cotton, flax, oilseed rape, coconut, oil palm, safflower (Carthamus tinctorius) or cocoa beans, for example by bathing scarred leaves or leaf segments in an agrobacterial solution and subsequently growing them in suitable media.

[0583] The genetically modified plant cells can be regenerated via all methods with which the skilled worker is familiar. Suitable methods can be found in the abovementioned publications by S. D. Kung and R. Wu, Potrykus or Höfgen and Willmitzer.

[0584] To select transformed plants, the plant material obtained in the transformation is, as a rule, subjected to selective conditions so that transformed plants can be distinguished from untransformed plants. For example, the seeds obtained in the above-described manner can be planted and, after an initial growing period, subjected to a suitable selection by spraying. A further possibility consists in growing the seeds, if appropriate after sterilization, on agar plates using a suitable selection agent so that only the transformed seeds can grow into plants. Alternatively, the transformed plants are screened for the presence of a selectable marker such as the ones described above.

[0585] Following DNA transfer and regeneration, putatively transformed plants may be evaluated, for instance using Southern analysis, for the presence of the gene of interest, copy number and/or genomic organisation. Alternatively or additionally, expression levels may be monitored using Northern and/or Western analysis, or quantitative PCR, all techniques being well known to persons having ordinary skill in the art.

[0586] The generated transformed plants may be propagated by a variety of means, such as by clonal propagation or classical breeding techniques. For example, a first generation (or T1) transformed plant may be selfed to give homozygous second generation (or T2) transformants, and the T2 plants further propagated through classical breeding techniques.

[0587] The generated transformed organisms may take a variety of forms. For example, they may be chimeras of transformed cells and non-transformed cells; clonal transformants (e.g., all cells transformed to contain the expression cassette); grafts of transformed and untransformed tissues (e.g., in plants, a transformed rootstock grafted to an untransformed scion).

[0588] The present invention clearly extends to any plant cell or plant produced by any of the methods described herein, and to all plant parts and propagules thereof. The present invention extends further to encompass the progeny of a primary transformed or transfected cell, tissue, organ or whole plant that has been produced by any of the aforementioned methods, the only requirement being that progeny exhibit the same genotypic and/or phenotypic characteristic(s) as those produced by the parent in the methods according to the invention.

[0589] The invention also includes host cells containing an isolated SIK nucleic acid as defined hereinabove. Preferred host cells according to the invention are plant cells. Host plants for the nucleic acids or the vector used in the method according to the invention, the expression cassette or construct or vector are, in principle, advantageously all plants, which are capable of synthesizing the polypeptides used in the inventive method.

[0590] The invention also extends to harvestable parts of a plant such as, but not limited to seeds, leaves, fruits, flowers, stems, rhizomes, tubers and bulbs. The invention furthermore relates to products derived, preferably directly derived, from a harvestable part of such a plant, such as dry pellets or powders, oil, fat and fatty acids, starch or proteins.

[0591] The present invention also encompasses use of SIK nucleic acids and SIK polypeptides in improving various yield-related traits as mentioned above.

[0592] Nucleic acids encoding SIK polypeptides may find use in breeding programmes in which a DNA marker is identified which may be genetically linked to a SIK gene. The nucleic acids/genes may be used to define a molecular marker. This DNA marker may then be used in breeding programmes to select plants having increased yield as defined hereinabove in the methods of the invention.

[0593] Allelic variants of a SIK nucleic acid/gene may also find use in marker-assisted breeding programmes. Such breeding programmes sometimes require introduction of allelic variation by mutagenic treatment of the plants, using for example EMS mutagenesis; alternatively, the programme may start with a collection of allelic variants of so called “natural” origin caused unintentionally. Identification of allelic variants then takes place, for example, by PCR. This is followed by a step for selection of superior allelic variants of the sequence in question and which give increased yield. Selection is typically carried out by monitoring growth performance of plants containing different allelic variants of the sequence in question. Growth performance may be monitored in a greenhouse or in the field. Further optional steps include crossing plants in which the superior allelic variant was identified with another plant. This could be used, for example, to make a combination of interesting phenotypic features.

[0594] A SIK nucleic acid may also be used as probes for genetically and physically mapping the genes that they are a part of, and as markers for traits linked to those genes. Such information may be useful in plant breeding in order to develop lines with desired phenotypes. Such use of SIK nucleic acids requires only a nucleic acid sequence of at least 15 nucleotides in length. The SIK nucleic acids may be used as restriction fragment length polymorphism (RFLP) markers. Southern blots (Sambrook J, Fritsch E F and Maniatis T (1989) Molecular Cloning, A Laboratory Manual) of restriction-digested plant genomic DNA may be probed with the SIK nucleic acids. The resulting banding patterns may then be subjected to genetic analyses using computer programs such as MapMaker (Lander et al. (1987) Genomics 1: 174-181) in order to construct a genetic map. In addition, the nucleic acids may be used to probe Southern blots containing restriction endonuclease-treated genomic DNAs of a set of individuals representing parent and progeny of a defined genetic cross. Segregation of the DNA polymorphisms is noted and used to calculate the position of the SIK nucleic acid in the genetic map previously obtained using this population (Botstein et al. (1980) Am. J. Hum. Genet. 32:314-331).

[0595] The production and use of plant gene-derived probes for use in genetic mapping is described in Bernatzky and Tanksley (Plant Mol. Biol. Reporter 4: 37-41, 1986). Numerous publications describe genetic mapping of specific cDNA clones using the methodology outlined above or variations thereof. For example, F2 intercross populations, backcross populations, randomly mated populations, near isogenic lines, and other sets of individuals may be used for mapping. Such methodologies are well known to those skilled in the art.

[0596] The nucleic acid probes may also be used for physical mapping (i.e., placement of sequences on physical maps; see Hoheisel et al. In: Non-mammalian Genomic Analysis: A Practical Guide, Academic press 1996, pp. 319-346, and references cited therein).

[0597] In another embodiment, the nucleic acid probes may be used in direct fluorescence in situ hybridisation (FISH) mapping (Trask (1991) Trends Genet. 7:149-154). Although current methods of FISH mapping favour use of large clones (several kb to several hundred kb; see Laan et al. (1995) Genome Res. 5:13-20), improvements in sensitivity may allow performance of FISH mapping using shorter probes.

[0598] A variety of nucleic acid amplification-based methods for genetic and physical mapping may be carried out using the nucleic acids. Examples include allele-specific amplification (Kazazian (1989) J. Lab. Clin. Med 11:95-96), polymorphism of PCR-amplified fragments (CAPS; Sheffield et al. (1993) Genomics 16:325-332), allele-specific ligation (Landegren et al. (1988) Science 241:1077-1080), nucleotide extension reactions (Sokolov (1990) Nucleic Acid Res. 18:3671), Radiation Hybrid Mapping (Walter et al. (1997) Nat. Genet. 7:22-28) and Happy Mapping (Dear and Cook (1989) Nucleic Acid Res. 17:6795-6807). For these methods, the sequence of a nucleic acid is used to design and produce primer pairs for use in the amplification reaction or in primer extension reactions. The design of such primers is well known to those skilled in the art. In methods employing PCR-based genetic mapping, it may be necessary to identify DNA sequence differences between the parents of the mapping cross in the region corresponding to the instant nucleic acid sequence. This, however, is generally not necessary for mapping methods.

[0599] The methods according to the present invention result in plants having altered yield-related traits, as described hereinbefore. These traits may also be combined with other economically advantageous traits, such as further yield-enhancing traits, tolerance to other abiotic and biotic stresses, traits modifying various architectural features and/or biochemical and/or physiological features.

### Detailed Description for the Class II HD-Zip Transcription Factors

[0600] It has now been found that nucleic acids encoding Class II HD-Zip transcription factors are useful in modifying the content of storage compounds in seeds. The present invention therefore provides a method for modifying the content of storage compounds in seeds relative to control plants by modulating expression in a plant of a nucleic acid encoding a Class II HD-Zip transcription factor. The present invention also provides nucleic acid sequences and constructs useful in performing such methods. The invention further provides seeds having a modified content of storage compounds relative to control plants, which seeds have modulated expression of a nucleic acid encoding a Class II HD-Zip transcription factor.

[0601] The present invention provides a method for modifying the content of storage compounds in seeds relative to control plants, comprising modulating expression in a plant of a nucleic acid encoding a Class II HD-Zip transcription factor.

[0602] A preferred method for modulating (preferably, increasing) expression of a nucleic acid encoding a Class II HD-Zip transcription factor is by introducing and expressing in a plant a nucleic acid encoding a Class II HD-Zip transcription factor as will now be defined.

[0603] A “Class II HD-Zip transcription factor” is taken to mean a polypeptide comprising the following: (i) a homeodomain box; (ii) a leucine zipper; and (iii) Motifs I, II and III given below (in any order).

### Motif I (SEQ ID NO: 279)

[0604] RKKLRL, or Motif I with one or more conservative amino acid substitution at any position, and/or Motif I with one or two non-conservative change(s) at any position; and

### Motif II (SEQ ID NO: 280)

[0605] TKLKQTEVDCEFLRRCCENLTEEN, or Motif II with one or more conservative amino acid substitution at any position, and/or a motif having in increasing order of preference at least 50%, 55%, 60%, 65%, 70%, 75%, 80%, 85%, 90%, 95% or more sequence identity to Motif II; and

### Motif III (SEQ ID NO: 281)

[0606] TLTMCPSCER, or Motif III with one or more conservative amino acid substitution at any position, and/or Motif III with one, two or three non-conservative change(s) at any position.

[0607] Any reference herein to a “nucleic acid encoding a Class II HD-Zip transcription factor” or to a Class II HD-Zip-encoding nucleic acid” is taken to mean a nucleic acid encoding a Class II HD-Zip transcription factor as defined hereinabove, such nucleic acids being useful in performing the methods of the invention.

[0608] As mentioned, a preferred method for modulating (preferably, increasing) expression of a nucleic acid encoding a Class II HD-Zip transcription factor is by introducing and expressing in a plant a nucleic acid encoding a Class II HD-Zip transcription factor.

[0609] The present invention is illustrated by transforming plants with the nucleic acid sequence represented by SEQ ID NO: 229, encoding the polypeptide sequence of SEQ ID NO: 230. However, performance of the invention is not restricted to these sequences; the methods of the invention may advantageously be performed using any Class II HD-Zip transcription factor-encoding nucleic acid or Class II HD-Zip transcription factor as defined herein.

[0610] For example, nucleic acids encoding orthologues or paralogues of an amino acid sequence represented by SEQ ID NO: 230 may be useful in performing the methods of the invention. Examples of such orthologues and paralogues are provided in Table A of Example 1.

[0611] Orthologues and paralogues encompass evolutionary concepts used to describe the ancestral relationships of genes. Paralogues are genes within the same species that have originated through duplication of an ancestral gene and orthologues are genes from different organisms that have originated through speciation.

[0612] Orthologues and paralogues may easily be found by performing a so-called reciprocal blast search. Typically this involves a first BLAST involving BLASTing a query sequence (for example, SEQ ID NO: 229 or SEQ ID NO: 230) against any sequence database, such as the publicly available NCBI database which may be found at: ncbi.nlm.nih.gov. BLASTN or TBLASTX (using standard default values) are generally used when starting from a nucleotide sequence, and BLASTP or TBLASTN (using standard default values) when starting from a protein sequence. The BLAST results may optionally be filtered. The full-length sequences of either the filtered results or non-filtered results are then BLASTed back (second BLAST) against sequences from the organism from which the query sequence is derived (where the query sequence is SEQ ID NO: 229 or SEQ ID NO: 230, the second BLAST would therefore be against Oryza sequences). The results of the first and second BLASTs are then compared. A paralogue is identified if a high-ranking hit from the first blast is from the same species as from which the query sequence is derived, a BLAST back then ideally results in the query sequence being among the highest hits; an orthologue is identified if a high-ranking hit in the first BLAST is not from the same species as from which the query sequence is derived, and preferably results upon BLAST back in the query sequence being among the highest hits. High-ranking hits are those having a low E-value. The lower the E-value, the more significant the score (or in other words the lower the chance that the hit was found by chance). Computation of the E-value is well known in the art. In addition to E-values, comparisons are also scored by percentage identity. Percentage identity refers to the number of identical nucleotides (or amino acids) between the two compared nucleic acid (or polypeptide) sequences over a particular length. In the case of large families, ClustalW may be used, followed by a neighbour joining tree, to help visualize clustering of related genes and to identify orthologues and paralogues.

[0613] Nucleic acids encoding homologues of an amino acid sequence represented by SEQ ID NO: 230, or nucleic acids encoding homologues of any of the amino acid sequences given in Table H, may also be useful in performing the methods of the invention.

[0614] Also useful in the methods of the invention are nucleic acids encoding derivatives of any one of the amino acids given in Table H or derivatives of orthologues or paralogues of any of the amino acid sequences given in Table H. “Derivatives” include peptides, oligopeptides, polypeptides which may, compared to the amino acid sequence of the naturally-occurring form of the protein, such as the one presented in SEQ ID NO: 230, comprise substitutions of amino acids with non-naturally occurring amino acid residues, or additions of non-naturally occurring amino acid residues.

[0615] Homologues (or homologous proteins, encompassing orthologues and paralogues) may readily be identified using routine techniques well known in the art, such as by sequence alignment. Methods for the alignment of sequences for comparison are well known in the art, such methods include GAP, BESTFIT, BLAST, FASTA and TFASTA. GAP uses the algorithm of Needleman and Wunsch ((1970) J Mol Biol 48: 443-453) to find the alignment of two complete sequences that maximizes the number of matches and minimizes the number of gaps. The BLAST algorithm (Altschul et al. (1990) J Mol Biol 215: 403-410) calculates percent sequence identity and performs a statistical analysis of the similarity between the two sequences. The software for performing BLAST analysis is publicly available through the National Centre for Biotechnology Information. Homologues may readily be identified using, for example, the ClustalW multiple sequence alignment algorithm (version 1.83), with the default pairwise alignment parameters, and a scoring method in percentage. Global percentages of similarity and identity may also be determined using one of the methods available in the MatGAT software package (Campanella et al., BMC Bioinformatics. 4, 29, 2003). Minor manual editing may be performed to optimise alignment between conserved motifs, as would be apparent to a person skilled in the art. Furthermore, instead of using full-length sequences for the identification of homologues, specific domains may be used as well.

[0616] The sequence identity values, which are indicated below as a percentage were determined over the entire nucleic acid or amino acid sequence using ClustalW and default parameters.

[0617] Preferably, the polypeptides encoded by the nucleic acids useful in the methods of the present invention (such as any of the polypeptide sequences given in Table H) have, in increasing order of preference, at least 40%, 41%, 42%, 43%, 44%, 45%, 46%, 47%, 48%, 49%, 50%, 51%, 52%, 53%, 54%, 55%, 56%, 57%, 58%, 59%, 60%, 61%, 62%, 63%, 64%, 65%, 66%, 67%, 68%, 69%, 70%, 71%, 72%, 73%, 74%, 75%, 76%, 77%, 78%, 79%, 80%, 81%, 82%, 83%, 84%, 85%, 86%, 87%, 88%, 89%, 90%, 91%, 92%, 93%, 94%, 95%, 96%, 97%, 98%, 99% identity to the polypeptide of SEQ ID NO: 230.

[0618] According to the present invention, there is provided a method for modifying the content of storage compounds in seeds relative to control plants, comprising modulating expression in a plant of a nucleic acid encoding a Class II HD-Zip transcription factor represented by SEQ ID NO: 2 or an orthologue, paralogue or homologue thereof.

[0619] A preferred method for modulating (preferably, increasing) expression of a nucleic acid encoding a Class II HD-Zip transcription factor is by introducing and expressing in a plant a nucleic acid encoding a Class II HD-Zip transcription factor represented by SEQ ID NO: 230 or an orthologue, paralogue or homologue thereof.

[0620] The orthologues, paralogues and homologues described above fall under the definition of a Class II HD-Zip transcription factor, i.e. meaning that the orthologues, paralogues and homologues are polypeptides comprising the following: (i) a homeodomain box; (ii) a leucine zipper; and (iii) Motifs I, II and III described herein.

[0621] The various domains and motifs may be used to help identify sequences useful in the methods of the invention. Specialist databases also exist for the identification of domains, for example, SMART (Schultz et al. (1998) Proc. Natl. Acad. Sci. USA 95, 5857-5864; Letunic et al. (2002) Nucleic Acids Res 30, 242-244, InterPro (Mulder et al., (2003) Nucl. Acids. Res. 31, 315-318, Prosite (Bucher and Bairoch (1994), A generalized profile syntax for biomolecular sequences motifs and its function in automatic sequence interpretation. (In) ISMB-94; Proceedings 2nd International Conference on Intelligent Systems for Molecular Biology. Altman R., Brutlag D., Karp P., Lathrop R., Searls D., Eds., pp 53-61, AAAIPress, Menlo Park; Hulo et al., Nucl. Acids. Res. 32:D134-D137, (2004), or Pfam (Bateman et al., Nucleic Acids Research 30(1): 276-280 (2002). Domains and motifs may also be identified using routine techniques, such as by sequence alignment as described herein.

[0622] Nucleic acids useful in the methods of the invention need not be full-length, since performance of the methods of the invention does not rely on the use of full length nucleic acids. Examples include portions of the nucleic acid sequence represented by SEQ ID NO: 229 or portions of any one of the nucleic acid sequences given in Table H.

[0623] According to the present invention, there is provided a method for modifying the content of storage compounds in seeds relative to control plants, comprising modulating expression in a plant of a portion of a nucleic acid sequence represented by SEQ ID NO: 229, or comprising modulating expression in a plant of a portion of any one of the nucleic acid sequences given in Table H, or comprising modulating expression in a plant of a portion of a nucleic acid sequence encoding an orthologue, paralogue or homologue of any of the amino acid sequences given in Table H.

[0624] A preferred method for modulating (preferably, increasing) expression in a plant of such a portion is by introducing and expressing in a plant a portion of a nucleic acid sequence given in Table H, or comprising introducing and expressing in a plant a portion of a nucleic acid sequence encoding an orthologue, paralogue or homologue of any of the polypeptide sequences given in Table H.

[0625] Portions useful in the methods of the invention, include portions of sufficient length to encode a polypeptide falling under the definition of a Class II HD-Zip transcription factor, i.e. meaning that the polypeptide comprises the following: (i) a homeodomain box; (ii) a leucine zipper; and (iii) Motifs I, II and III described herein. Furthermore, such portions have substantially the same biological activity as Class II HD-Zip transcription factors.

[0626] Preferably, the portion is at least 500 consecutive nucleotides in length, preferably at least 750 consecutive nucleotides in length, more preferably at least 1,250 consecutive nucleotides in length, the consecutive nucleotides being of SEQ ID NO: 229, or of any one of the nucleic acid sequences given in Table H, or of any nucleic acid encoding an orthologue, paralogue or homologue of any one of the amino acid sequences given in Table H. Most preferably the portion is a portion of the nucleic acid of SEQ ID NO: 229.

[0627] A portion as defined herein may be prepared, for example, by making one or more deletions to the nucleic acid in question. The portions may be used in isolated form or they may be fused to other coding (or non coding) sequences in order to, for example, produce a protein that combines several activities. When fused to other coding sequences, the resultant polypeptide produced upon translation may be bigger than that predicted for the portion.

[0628] Another nucleic acid useful in the methods of the invention is a nucleic acid capable of hybridising, under reduced stringency conditions, preferably under medium stringency conditions, more preferably under stringent conditions, with a nucleic acid represented by SEQ ID NO: 229, or capable of hybridising, under reduced stringency conditions, preferably under medium stringency conditions, more preferably under stringent conditions, with a nucleic acid sequence given in Table H, or capable of hybridising under reduced stringency conditions, preferably under medium stringency conditions, more preferably under stringent conditions with a nucleic acid encoding an orthologue, paralogue or homologue of a polypeptide sequence given in Table H.

[0629] According to the present invention, there is provided a method for modifying the content of storage compounds in seeds relative to control plants, comprising modulating expression in a plant of a nucleic acid capable of hybridising to a nucleic acid represented by SEQ ID NO: 229, or comprising modulating expression in a plant of a nucleic acid capable of hybridising to a nucleic acid sequence given in Table H, or comprising modulating expression in a plant of a nucleic acid capable of hybridising to a nucleic acid sequence encoding an orthologue, paralogue or homologue of any of the polypeptide sequences given in Table H. Most preferably the hybridising sequence is capable of hybridising to a nucleic acid as represented by SEQ ID NO: 229. The hybridising sequence is preferably capable of hybridising under reduced stringency conditions, preferably under medium stringency conditions, more preferably under stringent conditions.

[0630] A preferred method for modulating (preferably, increasing) expression in a plant of such a hybridising sequence is by introducing and expressing in a plant a nucleic acid capable of hybridising to a nucleic acid sequence given in Table H, or comprising introducing and expressing in a plant of a nucleic acid sequence capable of hybridising to a nucleic acid sequence encoding an orthologue, paralogue or homologue of any one of the amino acid sequences given in Table H. Most preferably the hybridising sequence is capable of hybridising to a nucleic acid as represented by SEQ ID NO: 229. The hybridising sequence is preferably capable of hybridising under reduced stringency conditions, preferably under medium stringency conditions, more preferably under stringent conditions.

[0631] Hybridising sequences useful in the methods of the invention, include nucleic acids of sufficient length to encode a polypeptide falling under the definition of a Class II HD-Zip transcription factor, i.e. meaning that the polypeptide comprises the following: (i) a homeodomain box; (ii) a leucine zipper; and (iii) Motifs I, II and III described herein.

[0632] Furthermore, such hybridising sequences have substantially the same biological activity as the Class II HD-Zip transcription factors.

[0633] The hybridising sequence is typically at least 500 consecutive nucleotides in length, preferably at least 750 consecutive nucleotides in length, more preferably at least 1,250 consecutive nucleotides in length, the consecutive nucleotides being of any nucleic acid capable of hybridising to a nucleic acid sequence given in Table H, or of any nucleic acid encoding an orthologue, paralogue or homologue of any one of the amino acid sequences given in Table H. Most preferably the consecutive nucleotides are of a nucleic acid capable of hybridising to a nucleic acid represented by SEQ ID NO: 229 or to a portion thereof.

[0634] Another nucleic acid useful in the methods of the invention is a splice variant of SEQ ID NO: 229, or a splice variant of any of the nucleic acid sequences given in Table H, or a splice variant of a nucleic acid encoding an orthologue, paralogue or homologue of any one of the amino acid sequences given in Table H.

[0635] According to the present invention, there is provided a method for modifying the content of storage compounds in seeds relative to control plants, comprising modulating expression in a plant of a splice variant of a nucleic acid represented by SEQ ID NO: 229, or comprising modulating expression in a plant of a splice variant of nucleic acid sequence given in Table H, or comprising modulating expression in a plant of a splice variant of a nucleic acid sequence encoding an orthologue, paralogue or homologue of any one of the amino acid sequences given in Table H.

[0636] A preferred method for modulating (preferably, increasing) expression in a plant of such a splice variant is by introducing and expressing in a plant a splice variant of a nucleic acid sequence given in Table H, or comprising introducing and expressing in a plant a splice variant of a nucleic acid sequence encoding an orthologue, paralogue or homologue of any one of the amino acid sequences given in Table H.

[0637] Splice variants useful in the methods of the invention, include nucleic acids of sufficient length to encode a polypeptide falling under the definition of a Class II HD-Zip transcription factor, i.e. meaning that the polypeptide comprises the following: (i) a homeodomain box; (ii) a leucine zipper; and (iii) Motifs I, II and III described herein. Furthermore, such splice variants have substantially the same biological activity as the Class II HD-Zip transcription factors.

[0638] Another nucleic acid useful in performing the methods of the invention is an allelic variant of SEQ ID NO: 229, or an allelic variant of any of the nucleic acid sequences given in Table H, or an allelic variant of a nucleic acid encoding an orthologue, paralogue or homologue of any one of the amino acid sequences given in Table H. Allelic variants exist in nature, and encompassed within the methods of the present invention is the use of these natural alleles.

[0639] According to the present invention, there is provided a method for modifying the content of storage compounds in seeds relative to control plants, comprising modulating expression in a plant of an allelic variant of a nucleic acid represented by SEQ ID NO: 229, or comprising modulating expression in a plant of an allelic variant of nucleic acid sequence given in Table H, or comprising modulating expression in a plant of an allelic variant of a nucleic acid sequence encoding an orthologue, paralogue or homologue of any one of the amino acid sequences given in Table H.

[0640] A preferred method for modulating (preferably, increasing) expression in a plant of such an allelic variant is by introducing and expressing in a plant an allelic variant of a nucleic acid sequence given in Table H, or comprising introducing and expressing in a plant an allelic variant of a nucleic acid sequence encoding an orthologue, paralogue or homologue of any one of the amino acid sequences given in Table H.

[0641] Allelic variants useful in the methods of the invention, include nucleic acids of sufficient length to encode a polypeptide falling under the definition of a Class II HD-Zip transcription factor, i.e. meaning that the polypeptide comprises the following: (i) a homeodomain box; (ii) a leucine zipper; and (iii) Motifs I, II and III described herein. Furthermore, such allelic variants have substantially the same biological activity as the Class II HD-Zip transcription factors.

[0642] A further nucleic acid useful in the methods of the invention is a nucleic acid obtained by gene shuffling. Gene shuffling or directed evolution may also be used to generate variants of any one of the nucleic acids given in Table H, or variants of nucleic acids encoding orthologues, paralogues or homologues of any one of the amino acid sequences given in Table H.

[0643] According to the present invention, there is provided a method for modifying the content of storage compounds in seeds relative to control plants, comprising modulating expression in a plant of a variant of a nucleic acid represented by SEQ ID NO: 229, or comprising modulating expression in a plant of a variant of any one of the nucleic acid sequences given in Table H, or comprising modulating expression in a plant a variant of a nucleic acid encoding an orthologue, paralogue or homologue of any of the amino acid sequences given in Table H, which variant nucleic acid is obtained by gene shuffling.

[0644] A preferred method for modulating (preferably, increasing) expression in a plant of such a variant obtained by gene shuffling is by introducing and expressing in a plant a variant of any one of the nucleic acid sequences given in Table H, or comprising introducing and expressing in a plant a variant of a nucleic acid sequence encoding an orthologue, paralogue or homologue of any of the amino acid sequences given in Table H, which variant nucleic acid is obtained by gene shuffling.

[0645] Such variants obtained by gene shuffling useful in the methods of the invention, include nucleic acids of sufficient length to encode a polypeptide falling under the definition of a Class II HD-Zip transcription factor, i.e. meaning that the polypeptide comprising the following: (i) a homeodomain box; (ii) a leucine zipper; and (iii) Motifs I, II and III described herein.

[0646] Furthermore, nucleic acids useful in the methods of the invention may also be obtained by site-directed mutagenesis. Several methods are available to achieve site-directed mutagenesis, the most common being PCR-based methods (Current Protocols in Molecular Biology. Wiley Eds.).

[0647] Class II HD-Zip transcription factors exhibit the general biological activity of transcription factors (at least in their native form) and typically have DNA-binding activity and an activation domain. A person skilled in the art may easily determine the presence of an activation domain and DNA-binding activity using routine tools and techniques. Sessa et al., 1997 (J Mol Biol 274(3):303-309) studied the DNA-binding properties of the ATHB-1 and ATHB-2 (=HAT4) HD-Zip (HD-Zip-1 and -2) domains and found that they interact with DNA as homodimers and recognize two distinct 9 bp pseudopalindromic sequences, CAAT(A/T)ATTG (BS-1) and CAAT(G/C)ATTG (BS-2), respectively. From a mutational analysis of the HD-Zip-2 domain, they determined that conserved amino acid residues of helix 3, Val47 and Asn51, and Arg55 are essential for the DNA-binding activity of the HD-Zip-2 domain. They also report that the preferential recognition of a G/C base-pair at the central position by the HD-Zip-2 domain is abolished either by the replacement of Arg55 with lysine or by the substitution of Glu46 and Thr56 with the corresponding residues of the HD-Zip-1 domain (alanine and tryptophan, respectively).

[0648] According to a preferred feature of the invention, the modulated expression is increased expression. Methods for increasing expression of nucleic acids or genes, or gene products, are well documented in the art.

[0649] Another method for modulating expression in a plant of a nucleic acid encoding a Class II HD-Zip transcription factor comprises the reduction or substantial elimination of expression in a plant of an endogenous gene encoding a Class II HD-Zip transcription factor. Reference herein to “reduction or substantial elimination” is taken to mean a decrease in endogenous gene expression and/or polypeptide levels and/or polypeptide activity relative to control plants. The reduction or substantial elimination is in increasing order of preference at least 10%, 20%, 30%, 40% or 50%, 60%, 70%, 80%, 85%, 90%, or 95%, 96%, 97%, 98%, 99% or more reduced compared to that of control plants. Methods for decreasing expression are described above in the “definitions” sections.

[0650] For the reduction or substantial elimination of expression an endogenous gene in a plant, a sufficient length of substantially contiguous nucleotides of a nucleic acid sequence is required. In order to perform gene silencing, this may be as little as 20, 19, 18, 17, 16, 15, 14, 13, 12, 11, 10 or fewer nucleotides, alternatively this may be as much as the entire gene (including the 5′ and/or 3′ UTR, either in part or in whole). The stretch of substantially contiguous nucleotides may be derived from SEQ ID NO: 229, or from any of the nucleic acid sequences given in Table H, or from any nucleic acid capable of encoding an orthologue, paralogue or homologue of any one of the amino acid sequences given in Table H. A nucleic acid sequence encoding a (functional) polypeptide is not a requirement for the various methods discussed herein for the reduction or substantial elimination of expression of an endogenous gene.

[0651] Nucleic acids suitable for use in the methods of the invention may be derived from any natural or artificial source. The nucleic acid may be modified from its native form in composition and/or genomic environment through deliberate human manipulation. Preferably the nucleic acid is from a plant, further preferably from a dicotyledonous plant, further preferably from the family Brassicaceae, more preferably from Arabidopsis thaliana.

[0652] A preferred method for modulating (preferably, increasing) expression of a nucleic acid encoding a Class II HD-Zip transcription factor is by introducing and expressing in a plant a nucleic acid encoding a Class II HD-Zip transcription factor; however the effects of performing the method, i.e. the modified content of seed storage compounds, may also be achieved using other well known techniques. One such technique is T-DNA activation tagging. The effects of the invention may also be reproduced using the technique of TILLING. The effects of the invention may also be reproduced using homologous recombination, which allows introduction in a genome of a selected nucleic acid at a defined selected position.

[0653] Performance of the methods of the invention gives plants having seeds with a modified content of seed storage compounds relative to the seeds of control plants. The modified content of seed storage compounds refers to a modified content of one or more of lipids, oil, fatty acids, starch, sugar and proteins relative to that of control plants. Preferably, modulation of expression in a plant of a nucleic acid encoding a Class II HD-Zip transcription factor gives plants with seeds having increased oil content relative to the seeds of control plants. In such a case, the modulated expression is typically overexpression in a plant of a nucleic acid encoding a Class II HD-Zip transcription factor. Preferably, modulation of expression in a plant of a nucleic acid encoding a Class II HD-Zip transcription factor gives plants with seeds having increased protein content relative to the seeds of control plants. In such a case, the modulated expression is typically the reduction or substantial elimination of expression of an endogenous Class II HD-Zip transcription factor-encoding gene.

[0654] The present invention also encompasses plants or parts thereof (particularly seeds) obtainable by the methods according to the present invention. The plants or parts thereof comprise a nucleic acid transgene (comprising any one of the nucleic acid sequences described above as being useful in the methods of the invention).

[0655] The invention also provides genetic constructs and vectors to facilitate introduction and/or expression in a plant of the nucleic acid sequences described above as being useful in the methods of the invention.

[0656] More particularly, there is provided a gene construct comprising:
[0657] (i) A nucleic acid encoding a Class II HD-Zip transcription factor as defined hereinabove;
[0658] (ii) One or more control sequences operably linked to the nucleic acid of (i).

[0659] Constructs useful in the methods according to the present invention may be constructed using recombinant DNA technology well known to persons skilled in the art. The gene constructs may be inserted into vectors, which may be commercially available, suitable for transforming into plants and suitable for expression of the gene of interest in the transformed cells. The invention therefore provides use of a gene construct as defined hereinabove in the methods of the invention.

[0660] Plants are transformed with a vector comprising the sequence of interest. The skilled artisan is well aware of the genetic elements that must be present in the vector in order to successfully transform, select and propagate host cells containing the sequence of interest. The sequence of interest is operably linked to one or more control sequences (at least to a promoter). The terms “regulatory element”, “control sequence” and “promoter” are all used interchangeably herein and are defined above.

[0661] Advantageously, any type of promoter, whether natural or synthetic, may be used to drive expression of the nucleic acid sequence. See the “Definitions” section herein for definitions of various promoter types.

[0662] According to a preferred feature of the invention, the nucleic acid of interest is operably linked to a constitutive promoter. A constitutive promoter is transcriptionally active during most but not necessarily all phases of growth and development and is substantially ubiquitously expressed. The constitutive promoter is preferably a GOS2 promoter, more preferably the constitutive promoter is a rice GOS2 promoter, further preferably the constitutive promoter is represented by a nucleic acid sequence substantially similar to SEQ ID NO: 56 or SEQ ID NO: 282, most preferably the constitutive promoter is as represented by SEQ ID NO: 56 or SEQ ID NO: 282. Examples of other constitutive promoters which may also be used to perform the methods of the invention are shown above.

[0663] Optionally, one or more terminator sequences may be used in the construct introduced into a plant. Additional regulatory elements may include transcriptional as well as translational enhancers. Those skilled in the art will be aware of terminator and enhancer sequences that may be suitable for use in performing the invention. An intron sequence may also be added to the 5′ untranslated region (UTR) or in the coding sequence to increase the amount of the mature message that accumulates in the cytosol, as described in the definitions section. Other control sequences (besides promoter, enhancer, silencer, intron sequences, 3′UTR and/or 5′UTR regions) may be protein and/or RNA stabilizing elements. Such sequences would be known or may readily be obtained by a person skilled in the art.

[0664] The genetic constructs of the invention may further include an origin of replication sequence that is required for maintenance and/or replication in a specific cell type. One example is when a genetic construct is required to be maintained in a bacterial cell as an episomal genetic element (e.g. plasmid or cosmid molecule). Preferred origins of replication include, but are not limited to, the f1-ori and colE1.

[0665] For the detection of the successful transfer of the nucleic acid sequences as used in the methods of the invention and/or selection of transgenic plants comprising these nucleic acids, it is advantageous to use marker genes (or reporter genes). Therefore, the genetic construct may optionally comprise a selectable marker gene. Selectable markers are described in more detail in the “definitions” section herein. The marker genes may be removed or excised from the transgenic cell once they are no longer needed. Techniques for marker removal are known in the art, useful techniques are described above in the definitions section.

[0666] The invention also provides a method for the production of transgenic plants having modified content of storage compounds in seeds relative to control plants, comprising introduction and expression in a plant of a nucleic acid sequence represented by SEQ ID NO: 229, or comprising introduction and expression in a plant of a nucleic acid sequence given in Table H, or comprising introduction and expression in a plant of a nucleic acid sequence encoding an orthologue, paralogue or homologue of any of the amino acid sequences given in Table H, or comprising introduction and expression in a plant of any of the nucleic acids defined herein as being useful in the methods of the invention.

[0667] More specifically, the present invention provides a method for the production of transgenic plants having modified content of storage compounds in seeds relative to control plants, which method comprises:
[0668] (i) introducing and expressing in a plant, plant part or plant cell a nucleic acid sequence represented by SEQ ID NO: 229, or comprising introducing and expressing in a plant a nucleic acid sequence given in Table H, or comprising introducing and expressing in a plant a nucleic acid sequence encoding an orthologue, paralogue or homologue of any of the amino acid sequences given in Table H; and
[0669] (ii) cultivating the plant cell under conditions promoting plant growth and development; and
[0670] (iii) harvest of seeds from the plant of (ii); and optionally
[0671] (iv) extraction of any one or more of lipids, oils, fatty acids, starch, sugar or protein from the seeds of (iii).

[0672] The harvested seeds may be processed to extract particular seed storage compounds, such as lipids, oils fatty acids, starch, sugar or protein. In particular, the seeds are used for oil extraction. The oils may be extracted from processed or unprocessed seeds.

[0673] The nucleic acid may be introduced directly into a plant cell or into the plant itself (including introduction into a tissue, organ or any other part of a plant). According to a preferred feature of the present invention, the nucleic acid is preferably introduced into a plant by transformation.

[0674] The term “transformation” as referred to herein is as defined above. Plant tissue capable of subsequent clonal propagation, whether by organogenesis or embryogenesis, may be transformed with a genetic construct of the present invention and a whole plant regenerated from there. The particular tissue chosen will vary depending on the clonal propagation systems available for, and best suited to, the particular species being transformed. Exemplary tissue targets include leaf disks, pollen, embryos, cotyledons, hypocotyls, megagametophytes, callus tissue, existing meristematic tissue (e.g., apical meristem, axillary buds, and root meristems), and induced meristem tissue (e.g., cotyledon meristem and hypocotyl meristem). The polynucleotide may be transiently or stably introduced into a host cell and may be maintained non-integrated, for example, as a plasmid. Alternatively, it may be integrated into the host genome. The resulting transformed plant cell may then be used to regenerate a transformed plant in a manner known to persons skilled in the art.

[0675] Transformation of plant species is now a fairly routine technique. Advantageously, any of several transformation methods may be used to introduce the gene of interest into a suitable ancestor cell. Transformation methods include the use of liposomes, electroporation, chemicals that increase free DNA uptake, injection of the DNA directly into the plant, particle gun bombardment, transformation using viruses or pollen and microprojection. Methods may be selected from the calcium/polyethylene glycol method for protoplasts (Krens, F. A. et al. (1982) Nature 296, 72-74; Negrutiu I et al. (1987) Plant Mol Biol 8: 363-373); electroporation of protoplasts (Shillito R. D. et al. (1985) Bio/Technol 3, 1099-1102); microinjection into plant material (Crossway A et al. (1986) Mol. Gen Genet 202: 179-185); DNA or RNA-coated particle bombardment (Klein T M et al. (1987) Nature 327: 70) infection with (non-integrative) viruses and the like. Transgenic rice plants are preferably produced via Agrobacterium-mediated transformation using any of the well known methods for rice transformation, such as described in any of the following: published European patent application EP 1198985 A1, Aldemita and Hodges (Planta 199: 612-617, 1996); Chan et al. (Plant Mol Biol 22 (3): 491-506, 1993), Hiei et al. (Plant J 6 (2): 271-282, 1994), which disclosures are incorporated by reference herein as if fully set forth. In the case of corn transformation, the preferred method is as described in either Ishida et al. (Nat. Biotechnol 14(6): 745-50, 1996) or Frame et al. (Plant Physiol 129(1): 13-22, 2002), which disclosures are incorporated by reference herein as if fully set forth.

[0676] The genetically modified plant cells can be regenerated via all methods with which the skilled worker is familiar. Suitable methods can be found in the abovementioned publications by S. D. Kung and R. Wu, Potrykus or Höfgen and Willmitzer.

[0677] Generally after transformation, plant cells or cell groupings are selected for the presence of one or more markers which are encoded by plant-expressible genes co-transferred with the gene of interest, following which the transformed material is regenerated into a whole plant. To select transformed plants, the plant material obtained in the transformation is, as a rule, subjected to selective conditions so that transformed plants can be distinguished from untransformed plants. For example, the seeds obtained in the above-described manner can be planted and, after an initial growing period, subjected to a suitable selection by spraying. A further possibility consists in growing the seeds, if appropriate after sterilization, on agar plates using a suitable selection agent so that only the transformed seeds can grow into plants. Alternatively, the transformed plants are screened for the presence of a selectable marker such as the ones described above.

[0678] Following DNA transfer and regeneration, putatively transformed plants may be evaluated, for instance using Southern analysis, for the presence of the gene of interest, copy number and/or genomic organisation. Alternatively or additionally, expression levels of the newly introduced DNA may be monitored using Northern and/or Western analysis, or quantitative PCR, all techniques being well known to persons having ordinary skill in the art.

[0679] The generated transformed plants may be propagated by a variety of means, such as by clonal propagation or classical breeding techniques. For example, a first generation (or T1) transformed plant may be selfed to give homozygous second generation (or T2) transformants, and the T2 plants further propagated through classical breeding techniques.

[0680] The generated transformed organisms may take a variety of forms. For example, they may be chimeras of transformed cells and non-transformed cells; clonal transformants (e.g., all cells transformed to contain the expression cassette); grafts of transformed and untransformed tissues (e.g., in plants, a transformed rootstock grafted to an untransformed scion).

[0681] The present invention clearly extends to any plant cell or plant produced by any of the methods described herein, and to all plant parts and propagules thereof. The present invention extends further to encompass the progeny of a primary transformed or transfected cell, tissue, organ or whole plant that has been produced by any of the aforementioned methods, the only requirement being that progeny exhibit the same genotypic and/or phenotypic characteristic(s) as those produced by the parent in the methods according to the invention.

[0682] The invention also includes host cells containing any one of the nucleic acids described above as being useful in the methods of the invention. Preferred host cells according to the invention are plant cells.

[0683] The methods of the invention are advantageously applicable to any plant. Plants that are particularly useful in the methods of the invention include all plants which belong to the superfamily Viridiplantae, in particular monocotyledonous and dicotyledonous plants including fodder or forage legumes, ornamental plants, food crops, trees or shrubs. According to a preferred embodiment of the present invention, the plant is a crop plant. Examples of crop plants include soybean, sunflower, canola, alfalfa, rapeseed, cotton, tomato, potato and tobacco. Further preferably, the plant is a monocotyledonous plant. Examples of monocotyledonous plants include sugarcane. More preferably the plant is a cereal. Examples of cereals include rice, maize, wheat, barley, millet, rye, triticale, sorghum and oats.

[0684] According to a further preferred embodiment of the present invention, the plant is a crop plant typically cultivated for oil production. Examples of such crop plants for oil production include rapeseed, canola, linseed, soybean, sunflower, maize, oat, rye, barley, wheat, pepper, tagetes, cotton, oil palm, coconut palm, flax, castor, peanut, olive, avocado, sesame, jatropha.

[0685] The invention also extends to harvestable parts of a plant, particularly seeds, but also leaves, fruits, flowers, stems, rhizomes, tubers, roots and bulbs. The invention furthermore relates to products derived, preferably directly derived, from a harvestable part of such a plant, such as dry pellets or powders, oil, fat and fatty acids, starch or proteins. A particular product of interest derived from a harvestable part of a plant is oil.

[0686] The present invention also encompasses use of any of the nucleic acids mentioned herein as being useful in the methods of the invention in modifying seed storage content relative to control plants. Particularly useful is the nucleic acid represented by SEQ ID NO: 229, and any of the nucleic acid sequences given in Table A, and any nucleic acid sequence encoding an orthologue, paralogue or homologue of any of the polypeptide sequences given in Table H. The present invention also encompasses use of a polypeptide sequence represented by SEQ ID NO: 230, and use of a polypeptide sequences given in Table H in modifying seed storage content relative to control plants.

[0687] These nucleic acids or the encoded polypeptides may find use in breeding programmes in which a DNA marker is identified which may be genetically linked to a Class II HD-Zip transcription factor-encoding gene. The nucleic acids/genes, or the polypeptides themselves may be used to define a molecular marker. This DNA or protein marker may then be used in breeding programmes to select plants having modified content of seed storage compounds.

[0688] Allelic variants may also find use in marker-assisted breeding programmes. Such breeding programmes sometimes require introduction of allelic variation by mutagenic treatment of the plants, using for example EMS mutagenesis; alternatively, the programme may start with a collection of allelic variants of so called “natural” origin caused unintentionally. Identification of allelic variants then takes place, for example, by PCR. This is followed by a step for selection of superior allelic variants of the sequence in question and which give increased yield. Selection is typically carried out by monitoring growth performance of plants containing different allelic variants of the sequence in question. Growth performance may be monitored in a greenhouse or in the field. Further optional steps include crossing plants in which the superior allelic variant was identified with another plant. This could be used, for example, to make a combination of interesting phenotypic features.

[0689] The nucleic acids may also be used as probes for genetically and physically mapping the genes that they are a part of, and as markers for traits linked to those genes. Such information may be useful in plant breeding in order to develop lines with desired phenotypes. Such use of requires only a nucleic acid sequence of at least 15 nucleotides in length. The nucleic acids may be used as restriction fragment length polymorphism (RFLP) markers. Southern blots (Sambrook J, Fritsch E F and Maniatis T (1989) Molecular Cloning, A Laboratory Manual) of restriction-digested plant genomic DNA may be probed with the nucleic acids. The resulting banding patterns may then be subjected to genetic analyses using computer programs such as MapMaker (Lander et al. (1987) Genomics 1: 174-181) in order to construct a genetic map. In addition, the nucleic acids may be used to probe Southern blots containing restriction endonuclease-treated genomic DNAs of a set of individuals representing parent and progeny of a defined genetic cross. Segregation of the DNA polymorphisms is noted and used to calculate the position of the nucleic acid in the genetic map previously obtained using this population (Botstein et al. (1980) Am. J. Hum. Genet. 32:314-331).

[0690] The production and use of plant gene-derived probes for use in genetic mapping is described in Bematzky and Tanksley (1986) Plant Mol. Biol. Reporter 4: 37-41. Numerous publications describe genetic mapping of specific cDNA clones using the methodology outlined above or variations thereof. For example, F2 intercross populations, backcross populations, randomly mated populations, near isogenic lines, and other sets of individuals may be used for mapping. Such methodologies are well known to those skilled in the art.

[0691] The nucleic acid probes may also be used for physical mapping (i.e., placement of sequences on physical maps; see Hoheisel et al. In: Non-mammalian Genomic Analysis: A Practical Guide, Academic press 1996, pp. 319-346, and references cited therein).

[0692] In another embodiment, the nucleic acid probes may be used in direct fluorescence in situ hybridisation (FISH) mapping (Trask (1991) Trends Genet. 7:149-154). Although current methods of FISH mapping favor use of large clones (several kb to several hundred kb; see Laan et al. (1995) Genome Res. 5:13-20), improvements in sensitivity may allow performance of FISH mapping using shorter probes.

[0693] A variety of nucleic acid amplification-based methods for genetic and physical mapping may be carried out using the nucleic acids. Examples include allele-specific amplification (Kazazian (1989) J. Lab. Clin. Med 11:95-96), polymorphism of PCR-amplified fragments (CAPS; Sheffield et al. (1993) Genomics 16:325-332), allele-specific ligation (Landegren et al. (1988) Science 241:1077-1080), nucleotide extension reactions (Sokolov (1990) Nucleic Acid Res. 18:3671), Radiation Hybrid Mapping (Walter et al. (1997) Nat. Genet. 7:22-28) and Happy Mapping (Dear and Cook (1989) Nucleic Acid Res. 17:6795-6807). For these methods, the sequence of a nucleic acid is used to design and produce primer pairs for use in the amplification reaction or in primer extension reactions. The design of such primers is well known to those skilled in the art. In methods employing PCR-based genetic mapping, it may be necessary to identify DNA sequence differences between the parents of the mapping cross in the region corresponding to the instant nucleic acid sequence. This, however, is generally not necessary for mapping methods.

[0694] The methods according to the present invention result in plants having modified content of seed storage compounds, as described hereinbefore. These traits may also be combined with other economically advantageous traits, such as yield-enhancing traits, tolerance to other abiotic and biotic stresses, traits modifying various architectural features and/or biochemical and/or physiological features.

### Detailed Description for the SYB1 Polypeptide

[0695] Surprisingly, it has now been found that modulating expression in a plant of a nucleic acid encoding a SYB1 polypeptide gives plants having enhanced yield-related traits relative to control plants. This yield increase was surprisingly observed when the plants were cultivated under conditions without stress (non-stress conditions). The particular class of SYB1 polypeptides suitable for enhancing yield-related traits in plants is described in detail below.

[0696] The present invention provides a method for enhancing yield-related traits in plants relative to control plants, comprising modulating expression in a plant of a nucleic acid encoding a SYB1 polypeptide. The term “modulation” means in relation to expression or gene expression, a process in which the expression level is changed by said gene expression in comparison to the control plant, preferably the expression level is increased. The original, unmodulated expression may be of any kind of expression of a structural RNA (rRNA, tRNA) or mRNA with subsequent translation.

[0697] Any reference hereinafter to a “protein useful in the methods of the invention” is taken to mean a SYB1 polypeptide as defined herein. Any reference hereinafter to a “nucleic acid useful in the methods of the invention” is taken to mean a nucleic acid capable of encoding such a SYB1 polypeptide. The terms “polypeptide” and “protein” are used interchangeably herein and refer to amino acids in a polymeric form of any length. The terms “polynucleotide(s)”, “nucleic acid sequence(s)”, “nucleotide sequence(s)” are used interchangeably herein and refer to nucleotides, either ribonucleotides or deoxyribonucleotides or a combination of both, in a polymeric form of any length.

[0698] A preferred method for modulating (preferably, increasing) expression of a nucleic acid encoding a protein useful in the methods of the invention is by introducing and expressing in a plant a nucleic acid encoding a protein useful in the methods of the invention as defined below.

[0699] The nucleic acid to be introduced into a plant (and therefore useful in performing the methods of the invention) is any nucleic acid encoding the type of protein which will now be described, hereafter also named “SYB1 nucleic acid” or “SYB1 gene”. A “SYB1” polypeptide as defined herein refers to any amino acid sequence comprising 3 Zinc finger domains of the RanBP type (SMART accession number: SM00547, Interpro accession number: IPR001876) and optionally one or more low complexity domain(s), but lacking, when analysed against the SMART database, any other domains that do not overlap with the Zinc finger domains or, if present, the low complexity domain. The ZnF_RBZ type Zinc finger domain is present in Ran-binding proteins (RanBPs), and other proteins. In RanBPs, this domain binds RanGDP. Low complexity domains may be identified using the SEG algorithm of Wootton and Federhen (Methods Enzymol. 266 (1996), pp. 554-571). Preferably SYB1 polypeptides in their natural form (that is, as they occur in nature) are in increasing order of preference, no longer then 350, 300, 290, 280, 270, 260, 250, 240, 230, 220, 210, 190 or 180 amino acids, more preferably the length of SYB1 polypeptide ranges between 180 and 130 amino acids.

[0700] Zinc finger domains are known to bind zinc ions and are generally involved in protein-DNA or protein-protein interactions. Preferably, the Zinc finger domains in the SYB1 protein start with one of the following motifs: (G/R/D/N)DW (motif 1, SEQ ID NO: 344), or GSW (motif 2, SEQ ID NO: 345), and has a first conserved cysteine residue on position 5 (wherein positions 1 to 3 are taken by motif 1 or motif 2), a second conserved cysteine residue between positions 7 and 10, a third conserved cysteine residue between positions 18 and 21 and a fourth conserved cysteine residue between positions 21 and 24. Furthermore, the Zinc finger domain in the SYB1 protein preferably comprises the conserved motifs NF(Q/C/S)(R/K)R (motif 3, SEQ ID NO: 346) or N(F/Y)(A/S/P)(N/S/F)R (motif 4, SEQ ID NO 347).

[0701] Optionally, the sequence located between the Zn-finger domains (say starting after the fourth conserved cysteine residue and ending before the start of motif 1 or 2) is enriched in glycine residues, the glycine content may be as high as 35%, or even higher (whereas the glycine content in an average protein is around 6.93% (SWISS PROT notes, release 44, July 2004)). Additionally or alternatively, the serine content in this sequence may also be increased compared to the serine content in an average protein (6.89%).

[0702] Preferably, the polypeptide sequence which when used in the construction of a phylogenetic tree, such as the one depicted in FIG. 23B, clusters with the group of SYB1 polypeptides comprising the amino acid sequence represented by SEQ ID NO: 286 rather than with any other group.

[0703] Examples of polypeptides useful in the methods of the invention and nucleic acids encoding the same are as given below in the table of Example 40.

[0704] Also useful in the methods of the invention are homologues of any one of the amino acid sequences given in the table of Example 40, and derivatives of any one of the polypeptides given in the table of Example 40 or orthologues or paralogues of any of the aforementioned SEQ ID NOs.

[0705] The invention is illustrated by transforming plants with the Arabidopsis thaliana nucleic acid sequence represented by SEQ ID NO: 285, encoding the polypeptide sequence of SEQ ID NO: 286, however performance of the invention is not restricted to these sequences. The methods of the invention may advantageously be performed using any nucleic acid encoding a protein useful in the methods of the invention as defined herein, including orthologues and paralogues, such as any of the nucleic acid sequences given in the table of Example 40. The amino acid sequences given in the table of Example 40 may be considered to be orthologues and paralogues of the SYB1 polypeptide represented by SEQ ID NO: 286.

[0706] Orthologues and paralogues may easily be found by performing a so-called reciprocal blast search. Typically, this involves a first BLAST involving BLASTing a query sequence (for example using any of the sequences listed in the table of Example 40) against any sequence database, such as the publicly available NCBI database. BLASTN or TBLASTX (using standard default values) are generally used when starting from a nucleotide sequence, and BLASTP or TBLASTN (using standard default values) when starting from a protein sequence. The BLAST results may optionally be filtered. The full-length sequences of either the filtered results or non-filtered results are then BLASTed back (second BLAST) against sequences from the organism from which the query sequence is derived (where the query sequence is SEQ ID NO: 285 or SEQ ID NO: 286, the second BLAST would therefore be against Arabidopsis thaliana sequences). The results of the first and second BLASTs are then compared. A paralogue is identified if a high-ranking hit from the first blast is from the same species as from which the query sequence is derived, a BLAST back then ideally results in the query sequence as highest hit; an orthologue is identified if a high-ranking hit in the first BLAST is not from the same species as from which the query sequence is derived, and preferably results upon BLAST back in the query sequence being among the highest hits.

[0707] High-ranking hits are those having a low E-value. The lower the E-value, the more significant the score (or in other words the lower the chance that the hit was found by chance). Computation of the E-value is well known in the art. In addition to E-values, comparisons are also scored by percentage identity. Percentage identity refers to the number of identical nucleotides (or amino acids) between the two compared nucleic acid (or polypeptide) sequences over a particular length. In the case of large families, ClustalW may be used, followed by a neighbour joining tree, to help visualize clustering of related genes and to identify orthologues and paralogues.

[0708] The table of Example 40 gives examples of orthologues and paralogues of the SYB1 protein represented by SEQ ID NO 286. Further orthologues and paralogues may readily be identified using the BLAST procedure described above.

[0709] The proteins of the invention are identifiable by the presence of three conserved ZnF_RBZ type Zinc finger domain domains (shown in FIG. 22). The terms “domain” and “motif” or “signature” are defined in the “Definitions” section. Specialist databases also exist for the identification of domains, for example, SMART (Schultz et al. (1998) Proc. Natl. Acad. Sci. USA 95, 5857-5864; Letunic et al. (2002) Nucleic Acids Res 30, 242-244, InterPro (Mulder et al., (2003) Nucl. Acids. Res. 31, 315-318, Prosite (Bucher and Bairoch (1994), A generalized profile syntax for biomolecular sequences motifs and its function in automatic sequence interpretation. (In) ISMB-94; Proceedings 2nd International Conference on Intelligent Systems for Molecular Biology. Altman R., Brutlag D., Karp P., Lathrop R., Searls D., Eds., pp 53-61, AAAIPress, Menlo Park; Hulo et al., Nucl. Acids. Res. 32:D134-D137, (2004), or Pfam (Bateman et al., Nucleic Acids Research 30(1): 276-280 (2002). A set of tools for in silico analysis of protein sequences is available on the ExPASY proteomics server (hosted by the Swiss Institute of Bioinformatics (Gasteiger et al., ExPASy: the proteomics server for in-depth protein knowledge and analysis, Nucleic Acids Res. 31:3784-3788 (2003)).

[0710] Domains may also be identified using routine techniques, such as by sequence alignment. Methods for the alignment of sequences for comparison are well known in the art, such methods include GAP, BESTFIT, BLAST, FASTA and TFASTA. GAP uses the algorithm of Needleman and Wunsch ((1970) J Mol Biol 48: 443-453) to find the global (i.e. spanning the complete sequences) alignment of two sequences that maximizes the number of matches and minimizes the number of gaps. The BLAST algorithm (Altschul et al. (1990) J Mol Biol 215: 403-10) calculates percent sequence identity and performs a statistical analysis of the similarity between the two sequences. The software for performing BLAST analysis is publicly available through the National Centre for Biotechnology Information (NCBI). Homologues may readily be identified using, for example, the ClustalW multiple sequence alignment algorithm (version 1.83), with the default pairwise alignment parameters, and a scoring method in percentage. Global percentages of similarity and identity may also be determined using one of the methods available in the MatGAT software package (Campanella et al., BMC Bioinformatics. 2003 Jul. 10; 4:29. MatGAT: an application that generates similarity/identity matrices using protein or DNA sequences.). Minor manual editing may be performed to optimise alignment between conserved motifs, as would be apparent to a person skilled in the art. Furthermore, instead of using full-length sequences for the identification of homologues, specific domains (such as the ZnF_RBZ type Zinc finger domain, or one of the motifs defined above) may be used as well. The sequence identity values, which are indicated below in Example 42 as a percentage were determined over the entire nucleic acid or amino acid sequence, and/or over selected domains or conserved motif(s), using the programs mentioned above using the default parameters.

[0711] Furthermore, SYB1 proteins (at least in their native form) may interact with proteins or nucleic acids and has the effect of increasing seed yield when expressed according to the methods of the present invention. Further details are provided in Example 45.

[0712] Nucleic acids encoding proteins useful in the methods of the invention need not be full-length nucleic acids, since performance of the methods of the invention does not rely on the use of full-length nucleic acid sequences. Examples of nucleic acids suitable for use in performing the methods of the invention include the nucleic acid sequences given in the table of Example 40, but are not limited to those sequences. Nucleic acid variants may also be useful in practising the methods of the invention. Examples of such nucleic acid variants include portions of nucleic acids encoding a protein useful in the methods of the invention, nucleic acids hybridising to nucleic acids encoding a protein useful in the methods of the invention, splice variants of nucleic acids encoding a protein useful in the methods of the invention, allelic variants of nucleic acids encoding a protein useful in the methods of the invention and variants of nucleic acids encoding a protein useful in the methods of the invention that are obtained by gene shuffling. The terms portion, hybridising sequence, splice variant, allelic variant and gene shuffling will now be described.

[0713] According to the present invention, there is provided a method for enhancing yield-related traits in plants, comprising introducing and expressing in a plant a portion of any one of the nucleic acid sequences given in the table of Example 40, or a portion of a nucleic acid encoding an orthologue, paralogue or homologue of any of the amino acid sequences given in the table of Example 40.

[0714] Portions useful in the methods of the invention, encode a polypeptide falling within the definition of a nucleic acid encoding a protein useful in the methods of the invention as defined herein and having substantially the same biological activity as the amino acid sequences given in the table of Example 40. Preferably, the portion is a portion of any one of the nucleic acids given in the table of Example 40. The portion is typically at least 200 consecutive nucleotides in length, preferably at least 300 consecutive nucleotides in length, more preferably at least 400 consecutive nucleotides in length and most preferably at least 500 consecutive nucleotides in length, the consecutive nucleotides being of any one of the nucleic acid sequences given in the table of Example 40. Most preferably the portion is a portion of the nucleic acid of SEQ ID NO: 285. Preferably, the portion encodes an amino acid sequence comprising three ZnF_RBZ type Zinc finger domains as defined herein. Preferably, the portion encodes an amino acid sequence which when used in the construction of a SYB1 phylogenetic tree, such as the one depicted in FIG. 23B, tends to cluster with the group of SYB1 proteins comprising the amino acid sequence represented by SEQ ID NO: 286 rather than with any other group.

[0715] A portion of a nucleic acid encoding a SYB1 protein as defined herein may be prepared, for example, by making one or more deletions to the nucleic acid. The portions may be used in isolated form or they may be fused to other coding (or non coding) sequences in order to, for example, produce a protein that combines several activities. When fused to other coding sequences, the resultant polypeptide produced upon translation may be bigger than that predicted for the SYB1 protein portion.

[0716] Another nucleic acid variant useful in the methods of the invention is a nucleic acid capable of hybridising, under reduced stringency conditions, preferably under stringent conditions, with a nucleic acid encoding a SYB1 protein as defined herein, or with a portion as defined herein.

[0717] Hybridising sequences useful in the methods of the invention, encode a polypeptide having three ZnF_RBZ type Zinc finger domains (see the alignment of FIG. 23A) and having substantially the same biological activity as the SYB1 protein represented by any of the amino acid sequences given in the table of Example 40. The hybridising sequence is typically at least 200 consecutive nucleotides in length, preferably at least 300 consecutive nucleotides in length, more preferably at least 400 consecutive nucleotides in length and most preferably at least 500 consecutive nucleotides in length, the consecutive nucleotides being of any one of the nucleic acid sequences given in the table of Example 40. Preferably, the hybridising sequence is one that is capable of hybridising to any of the nucleic acids given in the table of Example 40, or to a portion of any of these sequences, a portion being as defined above. Most preferably, the hybridising sequence is capable of hybridising to a nucleic acid as represented by SEQ ID NO: 285 or to a portion thereof. Preferably, the hybridising sequence encodes an amino acid sequence comprising any one or more of the motifs or domains as defined herein. Preferably, the hybridising sequence encodes an amino acid sequence which when used in the construction of a SYB1 phylogenetic tree, such as the one depicted in FIG. 23B, tends to cluster with the group of SYB1 proteins comprising the amino acid sequence represented by SEQ ID NO: 286 rather than with any other group.

[0718] According to the present invention, there is provided a method for enhancing yield-related traits in plants, comprising introducing and expressing in a plant a nucleic acid capable of hybridizing to any one of the nucleic acids given in the table of Example 40, or comprising introducing and expressing in a plant a nucleic acid capable of hybridising to a nucleic acid encoding an orthologue, paralogue or homologue of any of the nucleic acid sequences given in the table of Example 40.

[0719] Another nucleic acid variant useful in the methods of the invention is a splice variant encoding a SYB1 protein as defined hereinabove, the term “splice variant” being as defined above.

[0720] According to the present invention, there is provided a method for enhancing yield-related traits in plants, comprising introducing and expressing in a plant a splice variant of any one of the nucleic acid sequences given in the table of Example 40, or a splice variant of a nucleic acid encoding an orthologue, paralogue or homologue of any of the amino acid sequences given in the table of Example 40.

[0721] Preferred splice variants are splice variants of a nucleic acid represented by SEQ ID NO: 285 or a splice variant of a nucleic acid encoding an orthologue or paralogue of SEQ ID NO: 286. Preferably, the amino acid sequence encoded by the splice variant comprises any one or more of the motifs or domains as defined herein. Preferably, the amino acid sequence encoded by the splice variant, when used in the construction of a SYB1 phylogenetic tree, such as the one depicted in FIG. 23B, tends to cluster with the group of SYB1 proteins comprising the amino acid sequence represented by SEQ ID NO: 286 rather than with any other group.

[0722] Another nucleic acid variant useful in performing the methods of the invention is an allelic variant of a nucleic acid encoding a SYB1 protein as defined hereinabove. Allelic variants exist in nature, and encompassed within the methods of the present invention is the use of these natural alleles. The allelic variants useful in the methods of the present invention have substantially the same biological activity as the SYB1 protein of SEQ ID NO: 286.

[0723] According to the present invention, there is provided a method for enhancing yield-related traits in plants, comprising introducing and expressing in a plant an allelic variant of any one of the nucleic acids given in the table of Example 40, or comprising introducing and expressing in a plant an allelic variant of a nucleic acid encoding an orthologue, paralogue or homologue of any of the amino acid sequences given in the table of Example 40.

[0724] Preferably, the allelic variant is an allelic variant of SEQ ID NO: 285 or an allelic variant of a nucleic acid encoding an orthologue or paralogue of SEQ ID NO: 286. Preferably, the amino acid sequence encoded by the allelic variant comprises any one or more of the motifs or domains as defined herein. Preferably, the amino acid sequence encoded by the allelic variant, when used in the construction of a SYB1 phylogenetic tree, such as the one depicted in FIG. 23B, tends to cluster with the group of SYB1 proteins comprising the amino acid sequence represented by SEQ ID NO: 286 rather than with any other group.

[0725] A further nucleic acid variant useful in the methods of the invention is a nucleic acid variant obtained by gene shuffling, the term “gene shuffling” as described above.

[0726] According to the present invention, there is provided a method for enhancing yield-related traits in plants, comprising introducing and expressing in a plant a variant of any one of the nucleic acid sequences given in the table of Example 40, or comprising introducing and expressing in a plant a variant of a nucleic acid encoding an orthologue, paralogue or homologue of any of the amino acid sequences given in the table of Example 40, which variant nucleic acid is obtained by gene shuffling.

[0727] Preferably, the variant nucleic acid obtained by gene shuffling encodes an amino acid sequence comprising any one or more of the motifs or domains as defined herein. Preferably, the amino acid sequence encoded by the variant nucleic acid obtained by gene shuffling, when used in the construction of a SYB1 phylogenetic tree such as the one depicted in FIG. 23B, tends to cluster with the group of SYB1 proteins comprising the amino acid sequence represented by SEQ ID NO: 286 rather than with any other group.

[0728] Furthermore, nucleic acid variants may also be obtained by site-directed mutagenesis. Several methods are available to achieve site-directed mutagenesis, the most common being PCR based methods (Current Protocols in Molecular Biology. Wiley Eds.).

[0729] Nucleic acids encoding SYB1 proteins may be derived from any natural or artificial source. The nucleic acid may be modified from its native form in composition and/or genomic environment through deliberate human manipulation. Preferably the SYB1-encoding nucleic acid is from a plant, further preferably from a dicotyledonous plant, more preferably from the Brassicaceae family; most preferably the nucleic acid is from Arabidopsis thaliana.

[0730] Any reference herein to a SYB1 protein is therefore taken to mean a SYB1 protein as defined above. Any nucleic acid encoding such a SYB1 protein is suitable for use in performing the methods of the invention.

[0731] The present invention also encompasses plants or parts thereof (including seeds) obtainable by the methods according to the present invention. The plants or parts thereof comprise a nucleic acid transgene encoding a SYB1 protein as defined above.

[0732] The invention also provides genetic constructs and vectors to facilitate introduction and/or expression of the nucleic acid sequences useful in the methods according to the invention, in a plant. Constructs useful in the methods according to the present invention may be constructed using recombinant DNA technology well known to persons skilled in the art. The gene constructs may be inserted into vectors, which may be commercially available, suitable for transforming into plants and suitable for expression of the gene of interest in the transformed cells. The invention also provides use of a gene construct as defined herein in the methods of the invention.

[0733] More specifically, the present invention provides a construct comprising:
[0734] (i) a SYB1 nucleic acid or variant thereof, as defined hereinabove;
[0735] (ii) one or more control sequences operably linked the nucleic acid sequence of (i); and optionally
[0736] (iii) a transcription termination sequence.

[0737] Preferably, the nucleic acid encoding a SYB1 polypeptide is as defined above. The term “control sequence” and “termination sequence” are as defined herein.

[0738] Plants are transformed with a vector comprising the sequence of interest (i.e., a nucleic acid encoding a SYB1 polypeptide as defined herein. The skilled artisan is well aware of the genetic elements that must be present on the vector in order to successfully transform, select and propagate host cells containing the sequence of interest. The sequence of interest is operably linked to one or more control sequences (at least to a promoter). The terms “regulatory element”, “control sequence” and “promoter” are all used interchangeably herein and are defined above.

[0739] Advantageously, any type of promoter may be used to drive expression of the nucleic acid sequence. Preferably, the SYB1 nucleic acid or variant thereof is operably linked to a constitutive promoter. A preferred constitutive promoter is one that is also substantially ubiquitously expressed. Further preferably the promoter is derived from a plant, more preferably a monocotyledonous plant. Most preferred is use of a GOS2 promoter (from rice) (SEQ ID NO: 56 or 343). It should be clear that the applicability of the present invention is not restricted to the SYB1 nucleic acid represented by SEQ ID NO: 285, nor is the applicability of the invention restricted to expression of a SYB1 nucleic acid when driven by a GOS2 promoter. Examples of other constitutive promoters which may also be used to drive expression of a SYB1 nucleic acid are shown above.

[0740] Optionally, one or more terminator sequences may be used in the construct introduced into a plant. Additional regulatory elements may include transcriptional as well as translational enhancers. Those skilled in the art will be aware of terminator and enhancer sequences that may be suitable for use in performing the invention. An intron sequence may also be added to the 5′ untranslated region (UTR) or in the coding sequence to increase the amount of the mature message that accumulates in the cytosol, as described in the definitions section. Other control sequences (besides promoter, enhancer, silencer, intron sequences, 3′UTR and/or 5′UTR regions) may be protein and/or RNA stabilizing elements. Such sequences would be known or may readily be obtained by a person skilled in the art.

[0741] The genetic constructs of the invention may further include an origin of replication sequence that is required for maintenance and/or replication in a specific cell type. One example is when a genetic construct is required to be maintained in a bacterial cell as an episomal genetic element (e.g. plasmid or cosmid molecule). Preferred origins of replication include, but are not limited to, the f1-ori and colE1.

[0742] For the detection of the successful transfer of the nucleic acid sequences as used in the methods of the invention and/or selection of transgenic plants comprising these nucleic acids, it is advantageous to use marker genes (or reporter genes). “Selectable markers” are described in more detail in the definitions section. The marker genes may be removed or excised from the transgenic cell once they are no longer needed. Techniques for marker removal are known in the art, useful techniques are described above in the definitions section.

[0743] The invention also provides a method for the production of transgenic plants having enhanced yield-related traits relative to control plants, comprising introduction and expression in a plant of any nucleic acid encoding a SYB1 protein as defined hereinabove.

[0744] More specifically, the present invention provides a method for the production of transgenic plants having increased yield, which method comprises:
[0745] (i) introducing and expressing in a plant or plant cell a SYB1 nucleic acid or variant thereof; and
[0746] (ii) cultivating the plant cell under conditions promoting plant growth and development.

[0747] The nucleic acid of (i) may be any of the nucleic acids capable of encoding a SYB1 polypeptide as defined herein.

[0748] The nucleic acid may be introduced directly into a plant cell or into the plant itself (including introduction into a tissue, organ or any other part of a plant). According to a preferred feature of the present invention, the nucleic acid is preferably introduced into a plant by transformation. The term “transformation” is described in more detail in the “definitions” section herein.

[0749] The genetically modified plant cells can be regenerated via all methods with which the skilled worker is familiar. Suitable methods can be found in the abovementioned publications by S. D. Kung and R. Wu, Potrykus or Höfgen and Willmitzer.

[0750] Generally after transformation, plant cells or cell groupings are selected for the presence of one or more markers which are encoded by plant-expressible genes co-transferred with the gene of interest, following which the transformed material is regenerated into a whole plant. To select transformed plants, the plant material obtained in the transformation is, as a rule, subjected to selective conditions so that transformed plants can be distinguished from untransformed plants. For example, the seeds obtained in the above-described manner can be planted and, after an initial growing period, subjected to a suitable selection by spraying. A further possibility consists in growing the seeds, if appropriate after sterilization, on agar plates using a suitable selection agent so that only the transformed seeds can grow into plants. Alternatively, the transformed plants are screened for the presence of a selectable marker such as the ones described above.

[0751] Following DNA transfer and regeneration, putatively transformed plants may also be evaluated, for instance using Southern analysis, for the presence of the gene of interest, copy number and/or genomic organisation. Alternatively or additionally, expression levels of the newly introduced DNA may be monitored using Northern and/or Western analysis, both techniques being well known to persons having ordinary skill in the art.

[0752] The generated transformed plants may be propagated by a variety of means, such as by clonal propagation or classical breeding techniques. For example, a first generation (or T1) transformed plant may be selfed and homozygous second-generation (or T2) transformants selected, and the T2 plants may then further be propagated through classical breeding techniques.

[0753] The generated transformed organisms may take a variety of forms. For example, they may be chimeras of transformed cells and non-transformed cells; clonal transformants (e.g., all cells transformed to contain the expression cassette); grafts of transformed and untransformed tissues (e.g., in plants, a transformed rootstock grafted to an untransformed scion).

[0754] The present invention clearly extends to any plant cell or plant produced by any of the methods described herein, and to all plant parts and propagules thereof. The present invention extends further to encompass the progeny of a primary transformed or transfected cell, tissue, organ or whole plant that has been produced by any of the aforementioned methods, the only requirement being that progeny exhibit the same genotypic and/or phenotypic characteristic(s) as those produced by the parent in the methods according to the invention.

[0755] The invention also includes host cells containing an isolated nucleic acid encoding a SYB1 protein as defined hereinabove. Preferred host cells according to the invention are plant cells.

[0756] Host plants for the nucleic acids or the vector used in the method according to the invention, the expression cassette or construct or vector are, in principle, advantageously all plants, which are capable of synthesizing the polypeptides used in the inventive method.

[0757] The methods of the invention are advantageously applicable to any plant. Plants that are particularly useful in the methods of the invention include all plants which belong to the superfamily Viridiplantae, in particular monocotyledonous and dicotyledonous plants including fodder or forage legumes, ornamental plants, food crops, trees or shrubs. According to a preferred embodiment of the present invention, the plant is a crop plant. Examples of crop plants include soybean, sunflower, canola, alfalfa, rapeseed, cotton, tomato, potato and tobacco. Further preferably, the plant is a monocotyledonous plant. Examples of monocotyledonous plants include sugarcane. More preferably the plant is a cereal. Examples of cereals include rice, maize, wheat, barley, millet, rye, triticale, sorghum and oats.

[0758] The invention also extends to harvestable parts of a plant such as, but not limited to seeds, leaves, fruits, flowers, stems, rhizomes, tubers and bulbs. The invention furthermore relates to products derived, preferably directly derived, from a harvestable part of such a plant, such as dry pellets or powders, oil, fat and fatty acids, starch or proteins.

[0759] According to a preferred feature of the invention, the modulated expression is increased expression. As mentioned above, a preferred method for modulating (preferably, increasing) expression of a nucleic acid encoding a SYB1 protein is by introducing and expressing in a plant a nucleic acid encoding a SYB1 protein; however the effects of performing the method, i.e. enhancing yield-related traits may also be achieved using other well known techniques. One such technique is T-DNA activation tagging. The effects of the invention may also be reproduced using the technique of TILLING, or with homologous recombination, which allows introduction in a genome of a selected nucleic acid at a defined selected position.

[0760] Performance of the methods of the invention gives plants having enhanced yield-related traits. In particular performance of the methods of the invention gives plants having increased yield, especially increased seed yield relative to control plants. The terms “yield” and “seed yield” are described in more detail in the “definitions” section herein.

[0761] Reference herein to enhanced yield-related traits is taken to mean an increase in biomass (weight) of one or more parts of a plant, which may include aboveground (harvestable) parts and/or (harvestable) parts below ground.

[0762] In particular, such harvestable parts are seeds, and performance of the methods of the invention results in plants having increased seed yield relative to the seed yield of suitable control plants.

[0763] Taking corn as an example, a yield increase may be manifested as one or more of the following: increase in the number of plants established per square meter, an increase in the number of ears per plant, an increase in the number of rows, number of kernels per row, kernel weight, thousand kernel weight, ear length/diameter, increase in the seed filling rate (which is the number of filled seeds divided by the total number of seeds and multiplied by 100), among others. Taking rice as an example, a yield increase may manifest itself as an increase in one or more of the following: number of plants per square meter, number of panicles per plant, number of spikelets per panicle, number of flowers (florets) per panicle (which is expressed as a ratio of the number of filled seeds over the number of primary panicles), increase in the seed filling rate (which is the number of filled seeds divided by the total number of seeds and multiplied by 100), increase in thousand kernel weight, among others.

[0764] Since the transgenic plants according to the present invention have increased yield, it is likely that these plants exhibit an increased growth rate (during at least part of their life cycle), relative to the growth rate of control plants at a corresponding stage in their life cycle. The increased growth rate may be specific to one or more parts of a plant (including seeds), or may be throughout substantially the whole plant. Plants having an increased growth rate may have a shorter life cycle. The life cycle of a plant may be taken to mean the time needed to grow from a dry mature seed up to the stage where the plant has produced dry mature seeds, similar to the starting material. This life cycle may be influenced by factors such as early vigour, growth rate, greenness index, flowering time and speed of seed maturation. The increase in growth rate may take place at one or more stages in the life cycle of a plant or during substantially the whole plant life cycle. Increased growth rate during the early stages in the life cycle of a plant may reflect enhanced vigour. The increase in growth rate may alter the harvest cycle of a plant allowing plants to be sown later and/or harvested sooner than would otherwise be possible (a similar effect may be obtained with earlier flowering time). If the growth rate is sufficiently increased, it may allow for the further sowing of seeds of the same plant species (for example sowing and harvesting of rice plants followed by sowing and harvesting of further rice plants all within one conventional growing period). Similarly, if the growth rate is sufficiently increased, it may allow for the further sowing of seeds of different plants species (for example the planting and harvesting of corn plants followed by, for example, the planting and optional harvesting of soy bean, potato or any other suitable plant). Harvesting additional times from the same rootstock in the case of some crop plants may also be possible. Altering the harvest cycle of a plant may lead to an increase in annual biomass production per square meter (due to an increase in the number of times (say in a year) that any particular plant may be grown and harvested). An increase in growth rate may also allow for the cultivation of transgenic plants in a wider geographical area than their wild-type counterparts, since the territorial limitations for growing a crop are often determined by adverse environmental conditions either at the time of planting (early season) or at the time of harvesting (late season). Such adverse conditions may be avoided if the harvest cycle is shortened. The growth rate may be determined by deriving various parameters from growth curves, such parameters may be: T-Mid (the time taken for plants to reach 50% of their maximal size) and T-90 (time taken for plants to reach 90% of their maximal size), amongst others.

[0765] According to a preferred feature of the present invention, performance of the methods of the invention gives plants having an increased growth rate relative to control plants. Therefore, according to the present invention, there is provided a method for increasing the growth rate of plants, which method comprises modulating expression, preferably increasing expression, in a plant of a nucleic acid encoding a SYB1 protein as defined herein.

[0766] An increase in yield and/or growth rate occurs whether the plant is under non-stress conditions or whether the plant is exposed to various stresses compared to control plants. Plants typically respond to exposure to stress by growing more slowly. In conditions of severe stress, the plant may even stop growing altogether. Mild stress on the other hand is defined herein as being any stress to which a plant is exposed which does not result in the plant ceasing to grow altogether without the capacity to resume growth. Mild stress in the sense of the invention leads to a reduction in the growth of the stressed plants of less than 40%, 35% or 30%, preferably less than 25%, 20% or 15%, more preferably less than 14%, 13%, 12%, 11% or 10% or less in comparison to the control plant under non-stress conditions. Due to advances in agricultural practices (irrigation, fertilization, pesticide treatments) severe stresses are not often encountered in cultivated crop plants. As a consequence, the compromised growth induced by mild stress is often an undesirable feature for agriculture. Mild stresses are the everyday biotic and/or abiotic (environmental) stresses to which a plant is exposed. Abiotic stresses may be due to drought or excess water, anaerobic stress, salt stress, chemical toxicity, oxidative stress and hot, cold or freezing temperatures. The abiotic stress may be an osmotic stress caused by a water stress (particularly due to drought), salt stress, oxidative stress or an ionic stress. Biotic stresses are typically those stresses caused by pathogens, such as bacteria, viruses, fungi and insects.

[0767] In particular, the methods of the present invention may be performed under non-stress conditions or under conditions of mild drought to give plants having increased yield relative to control plants. As reported in Wang et al. (Planta (2003) 218: 1-14), abiotic stress leads to a series of morphological, physiological, biochemical and molecular changes that adversely affect plant growth and productivity. Drought, salinity, extreme temperatures and oxidative stress are known to be interconnected and may induce growth and cellular damage through similar mechanisms. Rabbani et al. (Plant Physiol (2003) 133: 1755-1767) describes a particularly high degree of “cross talk” between drought stress and high-salinity stress. For example, drought and/or salinisation are manifested primarily as osmotic stress, resulting in the disruption of homeostasis and ion distribution in the cell. Oxidative stress, which frequently accompanies high or low temperature, salinity or drought stress, may cause denaturing of functional and structural proteins. As a consequence, these diverse environmental stresses often activate similar cell signaling pathways and cellular responses, such as the production of stress proteins, up-regulation of anti-oxidants, accumulation of compatible solutes and growth arrest. The term “non-stress” conditions as used herein are those environmental conditions that allow optimal growth of plants. Persons skilled in the art are aware of normal soil conditions and climatic conditions for a given location.

[0768] Performance of the methods of the invention gives plants grown under non-stress conditions or under mild drought conditions increased yield relative to suitable control plants grown under comparable conditions. Therefore, according to the present invention, there is provided a method for increasing yield in plants grown under non-stress conditions or under mild drought conditions, which method comprises increasing expression in a plant of a nucleic acid encoding a SYB1 polypeptide.

[0769] Performance of the methods of the invention gives plants grown under conditions of nutrient deficiency, particularly under conditions of nitrogen deficiency, increased yield relative to control plants grown under comparable conditions. Therefore, according to the present invention, there is provided a method for increasing yield in plants grown under conditions of nutrient deficiency, which method comprises increasing expression in a plant of a nucleic acid encoding a SYB1 polypeptide. Nutrient deficiency may result from a lack of nutrients such as nitrogen, phosphates and other phosphorous-containing compounds, potassium, calcium, cadmium, magnesium, manganese, iron and boron, amongst others.

[0770] In a preferred embodiment of the invention, the increase in yield and/or growth rate occurs according to the methods of the present invention under non-stress conditions.

[0771] The present invention also encompasses use of nucleic acids encoding the SYB1 protein described herein and use of these SYB1 proteins in enhancing yield-related traits in plants. The present invention furthermore encompasses use of plants

[0772] Nucleic acids encoding the SYB1 protein described herein, or the SYB1 proteins themselves, may find use in breeding programmes in which a DNA marker is identified which may be genetically linked to a SYB1-encoding gene. The nucleic acids/genes, or the SYB1 proteins themselves may be used to define a molecular marker. This DNA or protein marker may then be used in breeding programmes to select plants having enhanced yield-related traits as defined hereinabove in the methods of the invention.

[0773] Allelic variants of a SYB1 protein-encoding nucleic acid/gene may also find use in marker-assisted breeding programmes. Such breeding programmes sometimes require introduction of allelic variation by mutagenic treatment of the plants, using for example EMS mutagenesis; alternatively, the programme may start with a collection of allelic variants of so called “natural” origin caused unintentionally. Identification of allelic variants then takes place, for example, by PCR. This is followed by a step for selection of superior allelic variants of the sequence in question and which give increased yield. Selection is typically carried out by monitoring growth performance of plants containing different allelic variants of the sequence in question. Growth performance may be monitored in a greenhouse or in the field. Further optional steps include crossing plants in which the superior allelic variant was identified with another plant. This could be used, for example, to make a combination of interesting phenotypic features.

[0774] Nucleic acids encoding SYB1 proteins may also be used as probes for genetically and physically mapping the genes that they are a part of, and as markers for traits linked to those genes. Such information may be useful in plant breeding in order to develop lines with desired phenotypes. Such use of SYB1 protein-encoding nucleic acids requires only a nucleic acid sequence of at least 15 nucleotides in length. The SYB1 protein-encoding nucleic acids may be used as restriction fragment length polymorphism (RFLP) markers. Southern blots (Sambrook J, Fritsch E F and Maniatis T (1989) Molecular Cloning, A Laboratory Manual) of restriction-digested plant genomic DNA may be probed with the SYB1 protein-encoding nucleic acids. The resulting banding patterns may then be subjected to genetic analyses using computer programs such as MapMaker (Lander et al. (1987) Genomics 1: 174-181) in order to construct a genetic map. In addition, the nucleic acids may be used to probe Southern blots containing restriction endonuclease-treated genomic DNAs of a set of individuals representing parent and progeny of a defined genetic cross. Segregation of the DNA polymorphisms is noted and used to calculate the position of the SYB1 protein-encoding nucleic acid in the genetic map previously obtained using this population (Botstein et al. (1980) Am. J. Hum. Genet. 32:314-331).

[0775] The production and use of plant gene-derived probes for use in genetic mapping is described in Bernatzky and Tanksley (1986) Plant Mol. Biol. Reporter 4: 37-41. Numerous publications describe genetic mapping of specific cDNA clones using the methodology outlined above or variations thereof. For example, F2 intercross populations, backcross populations, randomly mated populations, near isogenic lines, and other sets of individuals may be used for mapping. Such methodologies are well known to those skilled in the art.

[0776] The nucleic acid probes may also be used for physical mapping (i.e., placement of sequences on physical maps; see Hoheisel et al. In: Non-mammalian Genomic Analysis: A Practical Guide, Academic press 1996, pp. 319-346, and references cited therein).

[0777] In another embodiment, the nucleic acid probes may be used in direct fluorescence in situ hybridisation (FISH) mapping (Trask (1991) Trends Genet. 7:149-154). Although current methods of FISH mapping favour use of large clones (several kb to several hundred kb; see Laan et al. (1995) Genome Res. 5:13-20), improvements in sensitivity may allow performance of FISH mapping using shorter probes.

[0778] A variety of nucleic acid amplification-based methods for genetic and physical mapping may be carried out using the nucleic acids. Examples include allele-specific amplification (Kazazian (1989) J. Lab. Clin. Med 11:95-96), polymorphism of PCR-amplified fragments (CAPS; Sheffield et al. (1993) Genomics 16:325-332), allele-specific ligation (Landegren et al. (1988) Science 241:1077-1080), nucleotide extension reactions (Sokolov (1990) Nucleic Acid Res. 18:3671), Radiation Hybrid Mapping (Walter et al. (1997) Nat. Genet. 7:22-28) and Happy Mapping (Dear and Cook (1989) Nucleic Acid Res. 17:6795-6807). For these methods, the sequence of a nucleic acid is used to design and produce primer pairs for use in the amplification reaction or in primer extension reactions. The design of such primers is well known to those skilled in the art. In methods employing PCR-based genetic mapping, it may be necessary to identify DNA sequence differences between the parents of the mapping cross in the region corresponding to the instant nucleic acid sequence. This, however, is generally not necessary for mapping methods.

[0779] The methods according to the present invention result in plants having enhanced yield-related traits, as described hereinbefore. These traits may also be combined with other economically advantageous traits, such as further yield-enhancing traits, tolerance to other abiotic and biotic stresses, traits modifying various architectural features and/or biochemical and/or physiological features.

### DESCRIPTION OF FIGURES

[0780] The present invention will now be described with reference to the following figures in which:

[0781] FIG. 1 shows an example of the domain structure of an AZ polypeptide. The protein encoded by SEQ ID NO: 2 comprises two ankyrin repeats (bold, underlined) and two C3H1 domains (italics, underlined).

[0782] FIG. 2 shows the Ankyrin (ANK) and C3H1 Zinc finger (C3H1) consensus sequences according to the SMART database, the symbols for the various amino acid groups are given in the legend. The sequences shown are O04242/1-30 (SEQ ID NO: 359) and TTP_BOVIN/13-4 (SEQ ID NO: 360). The ANK consensus sequences shown are CONSENSUS/80% (SEQ ID NO: 412), CONSENSUS/65% (SEQ ID NO: 414) and CONSENSUS/50% (SEQ ID NO: 416). The C3H1 consensus sequences shown are CONSENSUS/80% (SEQ ID NO: 413), CONSENSUS/65% (SEQ ID NO: 415) and CONSENSUS/50% (SEQ ID NO: 417).

[0783] FIGS. 3A and 3B represent a sequence identity/similarity matrix prepared with MATGAT (BLOSUM62, gap opening penalty 11, gap extension penalty 1). Above the diagonal, in bold, the sequence identities are displayed, below the diagonal, sequence similarities are given for full length protein sequences (FIG. 3A) and partial protein sequences comprising the most C-terminal putative Zn-finger domain (FIG. 3B).

[0784] FIG. 4 shows the binary vector p056, for expression in Oryza sativa of an Arabidopsis thaliana AZ coding sequence under the control of a WSI18 promoter (internal reference PRO0151).

[0785] FIG. 5 shows the typical domain structure of SYT polypeptides from plants and mammals. The conserved SNH domain is located at the N-terminal end of the polypeptide. The C-terminal remainder of the polypeptide consists of a QG-rich domain in plant SYT polypeptides, and of a QPGY-rich domain in mammalian SYT polypeptides. A Met-rich domain is typically comprised within the first half of the QG-rich (from the N-term to the C-term) in plants or QPGY-rich in mammals. A second Met-rich domain may precede the SNH domain in plant SYT polypeptides

[0786] FIG. 6 shows a multiple alignment of the N-terminal end of several SYT polypeptides, using VNTI AlignX multiple alignment program, based on a modified ClustalW algorithm (InforMax, Bethesda, Md., informaxinc.com website), with default settings for gap opening penalty of 10 and a gap extension of 0.05). The SNH domain is boxed across the plant and human SYT polypeptides. The last line in the alignment consists of a consensus sequence derived from the aligned sequences. The sequences shown are: Brana_SYT1 (SEQ ID NO: 68); Brana_SYT2 (SEQ ID NO: 361); Bradi_SYT3 (SEQ ID NO: 94); Aqufo_SYT1 (SEQ ID NO: 92); Allce_SYT2 (SEQ ID NO: 90); Pinta_SYT1 (SEQ ID NO: 124); Picsi_SYT1 (SEQ ID NO: 122); Sorbi_SYT3 (SEQ ID NO: 136); Lacse_SYT2 (SEQ ID NO: 112); Horvu_SYT2 (SEQ ID NO: 110); Sacof_SYT2 (SEQ ID NO: 130); Zeama_SYT3 (SEQ ID NO: 144); Triae_SYT2 (SEQ ID NO: 138); Poptr_SYT1 (SEQ ID NO: 126); Vitvi_SYT1 (SEQ ID NO: 142); Triae_SYT3 (SEQ ID NO: 140); Soltu_SYT1 (SEQ ID NO: 134); Sacof_SYT3 (SEQ ID NO: 132); Sacof_SYT1 (SEQ ID NO: 128); Panvi_SYT3 (SEQ ID NO: 120); Maldo_SYT2 (SEQ ID NO: 116); Lyces_SYT1 (SEQ ID NO: 114); Goshi_SYT2 (SEQ ID NO: 108); Goshi_SYT1 (SEQ ID NO: 72); Glyso_SYT2 (SEQ ID NO: 104); Glyma_SYT2 (SEQ ID NO: 102); Eupes_SYT2 (SEQ ID NO: 100); Citsi_SYT2 (SEQ ID NO: 98); Orysa_SYT3 (SEQ ID NO: 80); Arath_SYT2 (SEQ ID NO: 62); Zeama_SYT1 (SEQ ID NO: 84); Medtr_SYT1 (SEQ ID NO: 74); Citsi_SYT1 (SEQ ID NO: 70); Arath_SYT1 (SEQ ID NO: 60); Zeama_SYT2 (SEQ ID NO: 86); Aspof_SYT1 (SEQ ID NO: 66); Orysa_SYT2 (SEQ ID NO: 78); Arath_SYT3 (SEQ ID NO: 64); Orysa_SYT1 (SEQ ID NO: 76); Soltu_SYT2 (SEQ ID NO: 82); Medtr_SYT2 (SEQ ID NO: 118); Homsa_SYT (SEQ ID NO: 88); Consensus (SEQ ID NO: 418).

[0787] FIG. 7 shows a multiple alignment of several plant SYT polypeptides, using VNTI AlignX multiple alignment program, based on a modified ClustalW algorithm (InforMax, Bethesda, Md., informaxinc.com website), with default settings for gap opening penalty of 10 and a gap extension of 0.05). The two main domains, from N-terminal to C-terminal, are boxed and identified as SNH domain and the Met-rich/QG-rich domain. Additionally, the N-terminal Met-rich domain is also boxed, and the positions of SEQ ID NO: 90 and SEQ ID NO 91 are underlined in bold. The sequences shown are: Brana_SYT1 (SEQ ID NO: 68); Aqufo_SYT1 (SEQ ID NO: 92); Picsi_SYT1 (SEQ ID NO: 122); Pinta_SYT1 (SEQ ID NO: 124); Poptr_SYT1 (SEQ ID NO: 126); Vitvi_SYT1 (SEQ ID NO: 142); Soltu_SYT1 (SEQ ID NO: 134); Lyces_SYT1 (SEQ ID NO: 114); Goshi_SYT1 (SEQ ID NO: 72); Zeama_SYT1 (SEQ ID NO: 84); Medtr_SYT1 (SEQ ID NO: 74); Citsi_SYT1 (SEQ ID NO: 70); Arath_SYT1 (SEQ ID NO: 60); Aspof_SYT1 (SEQ ID NO: 66); Orysa_SYT1 (SEQ ID NO: 76); Sacof_SYT1 (SEQ ID NO: 128); Allce_SYT2 (SEQ ID NO: 90); Lacse_SYT2 (SEQ ID NO: 112); Horvu_SYT2 (SEQ ID NO: 110); Brana_SYT2 (SEQ ID NO: 361); Sacof_SYT2 (SEQ ID NO: 130); Triae_SYT2 (SEQ ID NO: 138); Maldo_SYT2 (SEQ ID NO: 116); Goshi_SYT2 (SEQ ID NO: 108); Glyso_SYT2 (SEQ ID NO: 104); Glyma_SYT2 (SEQ ID NO: 102); Eupes_SYT2 (SEQ ID NO: 100); Arath_SYT2 (SEQ ID NO: 62); Citsi_SYT2 (SEQ ID NO: 98); Zeama_SYT2 (SEQ ID NO: 86); Orysa_SYT2 (SEQ ID NO: 78); Soltu_SYT2 (SEQ ID NO: 82); Medtr_SYT2 (SEQ ID NO: 118); Sorbi_SYT3 (SEQ ID NO: 136); Zeama_SYT3 (SEQ ID NO: 144); Bradi_SYT3 (SEQ ID NO: 94); Triae_SYT3 (SEQ ID NO: 140); Sacof_SYT3 (SEQ ID NO: 132); Panvi_SYT3 (SEQ ID NO: 120); Orysa_SYT3 (SEQ ID NO: 80); Arath_SYT3 (SEQ ID NO: 64); Consensus (SEQ ID NO: 419).

[0788] FIG. 8 shows a Neighbour joining tree resulting from the alignment of multiple SYT polypeptides using CLUSTALW 1.83 (align.genome.jp/sit-bin/clustalw website). The SYT1 and SYT2/SYT3 clades are identified with brackets.

[0789] FIG. 9 shows a binary vector p0523, for expression in Oryza sativa of an Arabidopsis thaliana AtSYT1 under the control of a GOS2 promoter (internal reference PRO0129).

[0790] FIG. 10 is an overview of the Calvin cycle. The thirteen enzymatic reactions are shown, as well as the enzyme names that perform these reactions. The black arrow shows the position of cpFBPase in the cycle.

[0791] FIG. 11 is a scheme showing the light-activation of cpFBPase via the ferredoxin-thioredoxin system.

[0792] FIG. 12 is an alignment of cyFBPase polypeptides and cpFBPase polypeptides. The polypeptide sequences were aligned using AlignX program from Vector NTI suite (InforMax, Bethesda, Md.). Multiple alignment was done with a gap opening penalty of 10 and a gap extension of 0.01. The predicted chloroplastic transit peptide of the cpFBPase polypeptides is boxed. The redox regulatory insertion and the cysteines involved in disulfide bridge formation are indicated. Finally, the active site region is also boxed, and the amino acid residues Asn237, Tyr269, Tyr289 and Arg268 which bind the 6-phosphate of fructose-1,6-bisphosphate, and Lys299 which binds the fructose are shown. The sequences shown are: Arath_cyFBPase (SEQ ID NO: 362); Euggr_cyFBPase (SEQ ID NO: 363); Synec_FBPasell (SEQ ID NO: 364); Arath_cpFBPase (SEQ ID NO: 161); Soltu_cpFBPase (SEQ ID NO: 189); Phypa_cpFBPase (SEQ ID NO: 197); Orysa_cpFBPase (SEQ ID NO: 175); Bigna_cpFBPase (SEQ ID NO: 157); Chlre_cpFBPase (SEQ ID NO: 155); Phatr_cpFBPase (SEQ ID NO: 181); Cyame_cpFBPase (SEQ ID NO: 165); Pissa_cpFBPase (SEQ ID NO: 183); Triae_cpFBPase (SEQ ID NO: 193); Zeama_cpFBPase (SEQ ID NO: 195); Pontr_cpFBPase (SEQ ID NO: 185); Brana_cpFBPase (SEQ ID NO: 163); Poptr_cpFBPase (SEQ ID NO: 187); Nicta_cpFBPase (SEQ ID NO: 173); Lyces_cpFBPase (SEQ ID NO: 169); Ostta_cpFBPase (SEQ ID NO: 179); Ostlu_cpFBPase (SEQ ID NO: 177); Galsu_cpFBPase partial (SEQ ID NO: 199); Linus_cpFBPase partial (SEQ ID NO: 205); Tagpa_cpFBPase partial (SEQ ID NO: 203); Marpo_cpFBPase partial (SEQ ID NO: 201); Consensus (SEQ ID NO: 420).

[0793] FIG. 13 shows a binary vector p1597, for increased expression in Oryza sativa of a Chlamydomonas reindhardtii nucleic acid encoding a cpFBPase polypeptide under the control of a GOS2 promoter (internal reference PRO0129).

[0794] FIG. 14 is an alignment of SIK nucleic acids encoding putative SIK orthologues described in Table 2. The sequences shown are: Gm_TC229774 (SEQ ID NO: 218); Gs_TC30779 (SEQ ID NO: 225); Hv_TC134680 (SEQ ID NO: 217); Le_TC158378 (SEQ ID NO: 220); Le_TC166426 (SEQ ID NO: 221); Ls_TC15801 (SEQ ID NO: 224); Mt_TC96175 (SEQ ID NO: 215); OS_SEQ ID 1 (SEQ ID NO: 245); Sb_TC103780 (SEQ ID NO: 213); So_TC67974 (SEQ ID NO: 214); St_TC117743 (SEQ ID NO: 219); Ta_TC257477 (SEQ ID NO: 222); Zm_TC299056 (SEQ ID NO: 223); Consensus (SEQ ID NO: 421).

[0795] FIG. 15 is an alignment of rice SIK polypeptide (SEQ ID NO: 2) and Arabidopsis SIK polypeptide (SEQ ID NO: 4) and OSSIK polypeptide having NCBI accession number OS_BAD73441 (SEQ ID NO: 210). The Consensus is SEQ ID NO: 422.

[0796] FIG. 16 represents the binary for vector endogenous gene silencing in Oryza sativa using a SIK nucleic acid represented by SEQ ID NO: 1 using a hairpin construct under the control of a constitutive promoter, GOS2.

[0797] FIG. 17 shows a binary vector for expression in Oryza sativa of a SIK-encoding nucleic acid from Oryza sativa under the control of a GOS2 promoter.

[0798] FIG. 18 shows a section of a HD-Zip phylogenetic tree showing Class II HD-Zip members.

[0799] FIG. 19 shows an alignment of several Class II HD-Zip polypeptide sequences. The sequences shown are: glycina, (SEQ ID NO: 365); homeobox-leucine, (SEQ ID NO: 366); AT4G16780 (SEQ ID NO: 230); AT4G17460 (SEQ ID NO: 256); AT5G47370 (SEQ ID NO: 258); AT2G44910 (SEQ ID NO: 260); AT3G60390 (SEQ ID NO: 262); THOM1″ (SEQ ID NO: 367); craterostigmaCPHB-3 (SEQ ID NO: 368); TaHDZipII-1″homeodomain-leucin (SEQ ID NO: 369); Hox2 (SEQ ID NO: 246); ricehox1homeodomain-leucine (SEQ ID NO: 370); Oshox1″homeodomain (SEQ ID NO: 371); OSJNBb0089A17.12″homeodomain (SEQ ID NO: 248); AT5G06710 (SEQ ID NO: 252); Pphb4″homeodomain-leucine (SEQ ID NO: 372); Mshb1″type (SEQ ID NO: 373); AT4G37790 (SEQ ID NO: 374); AT2G22800 (SEQ ID NO: 375); OJ1781E12.8″Hypothetical (SEQ ID NO: 376); OSJNOa174H12.5″putative (SEQ ID NO: 240); RiceHox7″AAQ55491.1″ (SEQ ID NO: 377); Oshox7″homeodomain (SEQ ID NO: 378); P0020C11.33″putative (SEQ ID NO: 379); AT2G01430 (SEQ ID NO: 380); AT1G70920 (SEQ ID NO: 381); riceP0510C12.22″putative (SEQ ID NO: 382).

[0800] FIG. 20 is an alignment taken from Henrikson et al., 2005 (Plant Physiol, Vol. 139, pp. 509-518). The Leu Zip domains in all HDZip I and II proteins are in identical positions, C terminal to the HD. The HDZip domains of HDZip I and II proteins are similar to each other in sequence, although a number of amino acid positions distinguish HDZip I from II. The amino acid at position 46 is invariant within the HDZip I and II, but distinct between the classes. Several other amino acids, e.g. the ones at positions 6, 25, 29, 30, 58, and 61, are invariable within the HDZip II and differ from HDZip I amino acids, which show variation at these positions. The sequences shown are: ATHB1 (SEQ ID NO: 383); ATHB3 (SEQ ID NO: 384); ATHB20 (SEQ ID NO: 385); ATHB13 (SEQ ID NO: 386); ATHB23 (SEQ ID NO: 387); ATHB5 (SEQ ID NO: 388); ATHB6 (SEQ ID NO: 389); ATHB16 (SEQ ID NO: 390); ATHB7 (SEQ ID NO: 391); ATHB12 (SEQ ID NO: 392); ATHB40 (SEQ ID NO: 393); ATHB21 (SEQ ID NO: 394); ATHB53 (SEQ ID NO: 395); ATHB51 (SEQ ID NO: 396); ATHB22 (SEQ ID NO: 397); ATHB54 (SEQ ID NO: 398); ATHB52 (SEQ ID NO: 399); ATHB17 (SEQ ID NO: 400); HAT2 (SEQ ID NO: 401); HAT1 (SEQ ID NO: 402); HAT14 (SEQ ID NO: 403); ATHB4 (SEQ ID NO: 404); HAT3 (SEQ ID NO: 405); ATHB2 (SEQ ID NO: 406); HAT22 (SEQ ID NO: 407); HAT9 (SEQ ID NO: 408); HADcons (SEQ ID NO: 423).

[0801] FIG. 21 shows a binary vector for increased expression in Oryza sativa of the Arabidopsis thaliana Class II HD-Zip transcription factor (HAT4)-encoding nucleic acid under the control of a GOS2 promoter.

[0802] FIG. 22 shows the domain structure of two examples of SYB1 proteins. The Zinc finger domains are indicated in underlined bold.

[0803] FIG. 23A shows a multiple alignment of various SYB1 proteins (the sequences used are: CDS2671 (SEQ ID NO: 2), AAZ94630 (SEQ ID NO: 4), Q53AV6 (SEQ ID NO: 6), Q6Z6E6 (SEQ ID NO: 8), Q8GWD1 (SEQ ID NO: 10), Q9SW92 (SEQ ID NO: 12), Q8RYZ5 (SEQ ID NO: 14), beta vulgaris (SEQ ID NO: 16), Q8S8K1 (SEQ ID NO: 18), Q8GZ43 (SEQ ID NO: 20), Q7F1K4 (SEQ ID NO: 22), Q7XHQ8 (SEQ ID NO: 24)). The sequences shown in FIG. 23A are: BG450099_1 (SEQ ID NO: 409), DR459119_1 (SEQ ID NO: 314), DT494117_1 (SEQ ID NO: 326), DV465465B (SEQ ID NO: 328), DT457997_1 (SEQ ID NO: 410), DV143669_1 (SEQ ID NO: 312), DT496999_1 (SEQ ID NO: 318), BG238374B (SEQ ID NO: 324), DN152082_1 (SEQ ID NO: 332), DT581158_1 (SEQ ID NO: 338), DW105125_1 (SEQ ID NO: 411), DV221228_2 (SEQ ID NO: 316), BQ471337_1; (SEQ ID NO: 340); SEQ ID NO: 294; SEQ ID NO: 288; SEQ ID NO: 300; SEQ ID NO: 298; SEQ ID NO: 290; SEQ ID NO: 292; SEQ ID NO: 286; SEQ ID NO: 296; Consensus (SEQ ID NO: 424). FIG. 23B shows a phylogenetic tree in which the black box delineates the group of SYB1 proteins.

[0804] FIG. 24 shows the binary vector for increased expression in Oryza sativa of an Arabidopsis thaliana SYB1 protein-encoding nucleic acid under the control of a GOS2 promoter (internal reference PRO0129).

### EXAMPLES

[0805] The present invention will now be described with reference to the following examples, which are by way of illustration alone. The following examples are not intended to completely define or otherwise limit the scope of the invention.

[0806] DNA manipulation: unless otherwise stated, recombinant DNA techniques are performed according to standard protocols described in (Sambrook (2001) Molecular Cloning: a laboratory manual, 3rd Edition Cold Spring Harbor Laboratory Press, CSH, New York) or in Volumes 1 and 2 of Ausubel et al. (1994), Current Protocols in Molecular Biology, Current Protocols. Standard materials and methods for plant molecular work are described in Plant Molecular Biology Labfax (1993) by R. D. D. Croy, published by BIOS Scientific Publications Ltd (UK) and Blackwell Scientific Publications (UK).

### Example 1

### Identification of Sequences Related to the Nucleic Acid Sequence Used in the Methods of the Invention

[0807] Sequences (full length cDNA, ESTs or genomic) related to the nucleic acid sequence used in the methods of the present invention were identified amongst those maintained in the Entrez Nucleotides database at the National Center for Biotechnology Information (NCBI) using database sequence search tools, such as the Basic Local Alignment Tool (BLAST) (Altschul et al. (1990) J. Mol. Biol. 215:403-410; and Altschul et al. (1997) Nucleic Acids Res. 25:3389-3402). The program is used to find regions of local similarity between sequences by comparing nucleic acid or polypeptide sequences to sequence databases and by calculating the statistical significance of matches. For example, the polypeptide encoded by the nucleic acid used in the present invention was used for the TBLASTN algorithm, with default settings and the filter to ignore low complexity sequences set off. The output of the analysis was viewed by pairwise comparison, and ranked according to the probability score (E-value), where the score reflect the probability that a particular alignment occurs by chance (the lower the E-value, the more significant the hit). In addition to E-values, comparisons were also scored by percentage identity. Percentage identity refers to the number of identical nucleotides (or amino acids) between the two compared nucleic acid (or polypeptide) sequences over a particular length. In some instances, the default parameters may be adjusted to modify the stringency of the search. For example the E-value may be increased to show less stringent matches. This way, short nearly exact matches may be identified.

[0808] Table A provides a list of nucleic acid sequences related to the nucleic acid sequence used in the methods of the present invention.

TABLE A
Examples of AZ polypeptides:

| | Nucleic acid | Protein |
|---|---|---|
| Plant Source | SEQ ID NO: | SEQ ID NO: |
| Arabidopsis thaliana | 1 | 2 |
| Eucalyptus grandis | 10 | 11 |
| Oryza sativa | 12 | 13 |
| Medicago truncatula | 14 | 15 |
| Oryza sativa | 16 | 17 |
| Arabidopsis thaliana | 18 | 19 |
| Oryza sativa | 20 | 21 |
| Arabidopsis thaliana | 22 | 23 |
| Arabidopsis thaliana | 24 | 25 |
| Eucalyptus grandis | 26 | 27 |
| Eucalyptus grandis | 28 | 29 |
| Glycine max | 30 | 31 |
| Eucalyptus grandis | 32 | 33 |
| Arabidopsis thaliana | 34 | 35 |
| Oryza sativa | 36 | 37 |
| Hordeum_vulgare | 38 | 39 |
| Pinus radiata | 40 | 41 |
| Pinus radiata | 42 | 43 |
| Glycine max | | 44 |
| Glycine max | | 45 |
| Glycine max | | 46 |
| Arabidopsis thaliana | | 47 |
| Arabidopsis thaliana | | 48 |
| Arabidopsis thaliana | | 49 |
| Arabidopsis thaliana | | 50 |
| Arabidopsis thaliana | | 51 |
| Arabidopsis thaliana | | 52 |
| Arabidopsis thaliana | 53 | |

[0809] In some instances, related sequences have tentatively been assembled and publicly disclosed by research institutions, such as The Institute for Genomic Research (TIGR). The Eukaryotic Gene Orthologs (EGO) database may be used to identify such related sequences, either by keyword search or by using the BLAST algorithm with the nucleic acid or polypeptide sequence of interest.

### Example 2

### Gene Cloning of AZ

[0810] The Arabidopsis AZ encoding gene (CDS3104) was amplified by PCR using as template an Arabidopsis thaliana seedling cDNA library (Invitrogen, Paisley, UK). After reverse transcription of RNA extracted from seedlings, the cDNAs were cloned into pCMV Sport 6.0. Average insert size of the bank was 1.5 kb, and the original number of clones was of 1.59×10⁷ cfu. Original titer was determined to be 9.6×10⁵ cfu/ml, after a first amplification of 6×10¹¹ cfu/ml. After plasmid extraction, 200 ng of template was used in a 50 μl PCR mix. Primers prm06717 (sense, AttB1 site in italic, start codon in bold: 5′-ggggacaagtttgtacaaaaaagcaggcttaaacaatgtgctgtggatcagacc-3′) (SEQ ID NO 7) and prm06718 (reverse, complementary, AttB2 site in italic: 5′-ggggaccactttgtacaagaaagctgggtggttaggtctctcaattctgc-3′) (SEQ ID NO 8), which include the AttB sites for Gateway recombination, were used for PCR amplification. PCR was performed using Hifi Taq DNA polymerase in standard conditions. A PCR fragment of the expected size was amplified and purified also using standard methods. The first step of the Gateway procedure, the BP reaction, was then performed, during which the PCR fragment recombines in vivo with the pDONR201 plasmid to produce, according to the Gateway terminology, an “entry clone”, p07. Plasmid pDONR201 was purchased from Invitrogen, as part of the Gateway® technology.

### Example 3

### Vector Construction

[0811] The entry clone p07 were subsequently used in an LR reaction with p02417, a destination vector used for plant (Oryza sativa) transformation. This vector contains as functional elements within the T-DNA borders: a plant selectable marker; a screenable marker expression cassette; and a Gateway cassette intended for LR in vivo recombination with the sequence of interest already cloned in the entry clone. A rice WSI18 promoter (SEQ ID NO: 9) for seed specific expression (PRO0151) was located upstream of this Gateway cassette (p056, FIG. 4).

[0812] Many different binary (and super binary) vector systems have been described for plant transformation (e.g. An, G. in Agrobacterium Protocols. Methods in Molecular Biology vol 44, pp 47-62, Gartland K M A and M R Davey eds. Humana Press, Totowa, N.J.). Many are based on the vector pBIN19 described by Bevan (Nucleic Acid Research. 1984. 12:8711-8721) that includes a plant gene expression cassette flanked by the left and right border sequences from the Ti plasmid of Agrobacterium tumefaciens. A plant gene expression cassette consists of at least two genes—a selection marker gene and a plant promoter regulating the transcription of the cDNA or genomic DNA of the trait gene. Various selection marker genes can be used including the Arabidopsis gene encoding a mutated acetohydroxy acid synthase (AHAS) enzyme (U.S. Pat. No. 5,767,3666 and 6225105). Similarly, various promoters can be used to regulate the trait gene to provide constitutive, developmental, tissue or environmental regulation of gene transcription.

[0813] After the LR recombination step, the resulting expression vector, p056 (FIG. 4), was transformed into Agrobacterium strain LBA4044 using heat shock or electroporation protocols. Transformed colonies were grown on YEP media and selected by respective antibiotics for two days at 28° C. These Agrobacterium cultures were used for the plant transformation.

[0814] Other Agrobacterium tumefaciens strains can be used for plant transformation and are well known in the art. Examples of such strains are C58C1 or EHA105.

### Example 4

### Plant Transformation

### Rice Transformation

[0815] The Agrobacterium containing the expression vector was used to transform Oryza sativa plants. Mature dry seeds of the rice japonica cultivar Nipponbare were dehusked. Sterilization was carried out by incubating for one minute in 70% ethanol, followed by 30 minutes in 0.2% HgCl₂, followed by a 6 times 15 minutes wash with sterile distilled water. The sterile seeds were then germinated on a medium containing 2,4-D (callus induction medium). After incubation in the dark for four weeks, embryogenic, scutellum-derived calli were excised and propagated on the same medium. After two weeks, the calli were multiplied or propagated by subculture on the same medium for another 2 weeks. Embryogenic callus pieces were sub-cultured on fresh medium 3 days before co-cultivation (to boost cell division activity).

[0816] Agrobacterium strain LBA4404 containing the expression vector was used for cocultivation. Agrobacterium was inoculated on AB medium with the appropriate antibiotics and cultured for 3 days at 28° C. The bacteria were then collected and suspended in liquid co-cultivation medium to a density (OD600) of about 1. The suspension was then transferred to a Petri dish and the calli immersed in the suspension for 15 minutes. The callus tissues were then blotted dry on a filter paper and transferred to solidified, co-cultivation medium and incubated for 3 days in the dark at 25° C. Co-cultivated calli were grown on 2,4-D-containing medium for 4 weeks in the dark at 28° C. in the presence of a selection agent. During this period, rapidly growing resistant callus islands developed. After transfer of this material to a regeneration medium and incubation in the light, the embryogenic potential was released and shoots developed in the next four to five weeks. Shoots were excised from the calli and incubated for 2 to 3 weeks on an auxin-containing medium from which they were transferred to soil. Hardened shoots were grown under high humidity and short days in a greenhouse.

[0817] Approximately 35 independent T0 rice transformants were generated for one construct. The primary transformants were transferred from a tissue culture chamber to a greenhouse. After a quantitative PCR analysis to verify copy number of the T-DNA insert, only single copy transgenic plants that exhibit tolerance to the selection agent were kept for harvest of T1 seed. Seeds were then harvested three to five months after transplanting. The method yielded single locus transformants at a rate of over 50% (Aldemita and Hodges 1996, Chan et al. 1993, Hiei et al. 1994).

### Corn Transformation

[0818] Transformation of maize (Zea mays) is performed with a modification of the method described by Ishida et al. (1996) Nature Biotech 14(6): 745-50. Transformation is genotype-dependent in corn and only specific genotypes are amenable to transformation and regeneration. The inbred line A188 (University of Minnesota) or hybrids with A188 as a parent are good sources of donor material for transformation, but other genotypes can be used successfully as well. Ears are harvested from corn plant approximately 11 days after pollination (DAP) when the length of the immature embryo is about 1 to 1.2 mm. Immature embryos are cocultivated with Agrobacterium tumefaciens containing the expression vector, and transgenic plants are recovered through organogenesis. Excised embryos are grown on callus induction medium, then maize regeneration medium, containing the selection agent (for example imidazolinone but various selection markers can be used). The Petri plates are incubated in the light at 25° C. for 2-3 weeks, or until shoots develop. The green shoots are transferred from each embryo to maize rooting medium and incubated at 25° C. for 2-3 weeks, until roots develop. The rooted shoots are transplanted to soil in the greenhouse. T1 seeds are produced from plants that exhibit tolerance to the selection agent and that contain a single copy of the T-DNA insert.

### Wheat Transformation

[0819] Transformation of wheat is performed with the method described by Ishida et al. (1996) Nature Biotech 14(6): 745-50. The cultivar Bobwhite (available from CIMMYT, Mexico) is commonly used in transformation. Immature embryos are co-cultivated with Agrobacterium tumefaciens containing the expression vector, and transgenic plants are recovered through organogenesis. After incubation with Agrobacterium, the embryos are grown in vitro on callus induction medium, then regeneration medium, containing the selection agent (for example imidazolinone but various selection markers can be used). The Petri plates are incubated in the light at 25° C. for 2-3 weeks, or until shoots develop. The green shoots are transferred from each embryo to rooting medium and incubated at 25° C. for 2-3 weeks, until roots develop. The rooted shoots are transplanted to soil in the greenhouse. T1 seeds are produced from plants that exhibit tolerance to the selection agent and that contain a single copy of the T-DNA insert.

### Soybean Transformation

[0820] Soybean is transformed according to a modification of the method described in the Texas A&M patent U.S. Pat. No. 5,164,310. Several commercial soybean varieties are amenable to transformation by this method. The cultivar Jack (available from the Illinois Seed foundation) is commonly used for transformation. Soybean seeds are sterilised for in vitro sowing. The hypocotyl, the radicle and one cotyledon are excised from seven-day old young seedlings. The epicotyl and the remaining cotyledon are further grown to develop axillary nodes. These axillary nodes are excised and incubated with Agrobacterium tumefaciens containing the expression vector. After the cocultivation treatment, the explants are washed and transferred to selection media. Regenerated shoots are excised and placed on a shoot elongation medium. Shoots no longer than 1 cm are placed on rooting medium until roots develop. The rooted shoots are transplanted to soil in the greenhouse. T1 seeds are produced from plants that exhibit tolerance to the selection agent and that contain a single copy of the T-DNA insert.

### Rapeseed/Canola Transformation

[0821] Cotyledonary petioles and hypocotyls of 5-6 day old young seedling are used as explants for tissue culture and transformed according to Babic et al. (1998, Plant Cell Rep 17: 183-188). The commercial cultivar Westar (Agriculture Canada) is the standard variety used for transformation, but other varieties can also be used. Canola seeds are surface-sterilized for in vitro sowing. The cotyledon petiole explants with the cotyledon attached are excised from the in vitro seedlings, and inoculated with Agrobacterium (containing the expression vector) by dipping the cut end of the petiole explant into the bacterial suspension. The explants are then cultured for 2 days on MSBAP-3 medium containing 3 mg/l BAP, 3% sucrose, 0.7 Phytagar at 23° C., 16 hr light. After two days of co-cultivation with Agrobacterium, the petiole explants are transferred to MSBAP-3 medium containing 3 mg/l BAP, cefotaxime, carbenicillin, or timentin (300 mg/l) for 7 days, and then cultured on MSBAP-3 medium with cefotaxime, carbenicillin, or timentin and selection agent until shoot regeneration. When the shoots are 5-10 mm in length, they are cut and transferred to shoot elongation medium (MSBAP-0.5, containing 0.5 mg/l BAP). Shoots of about 2 cm in length are transferred to the rooting medium (MS0) for root induction. The rooted shoots are transplanted to soil in the greenhouse. T1 seeds are produced from plants that exhibit tolerance to the selection agent and that contain a single copy of the T-DNA insert.

### Alfalfa Transformation

[0822] A regenerating clone of alfalfa (Medicago sativa) is transformed using the method of (McKersie et al., 1999 Plant Physiol 119: 839-847). Regeneration and transformation of alfalfa is genotype dependent and therefore a regenerating plant is required. Methods to obtain regenerating plants have been described. For example, these can be selected from the cultivar Rangelander (Agriculture Canada) or any other commercial alfalfa variety as described by Brown D C W and A Atanassov (1985. Plant Cell Tissue Organ Culture 4: 111-112). Alternatively, the RA3 variety (University of Wisconsin) has been selected for use in tissue culture (Walker et al., 1978 Am J Bot 65:654-659). Petiole explants are cocultivated with an overnight culture of Agrobacterium tumefaciens C58C1 pMP90 (McKersie et al., 1999 Plant Physiol 119: 839-847) or LBA4404 containing the expression vector. The explants are cocultivated for 3 d in the dark on SH induction medium containing 288 mg/L Pro, 53 mg/L thioproline, 4.35 g/L K2SO4, and 100 μm acetosyringinone. The explants are washed in half-strength Murashige-Skoog medium (Murashige and Skoog, 1962) and plated on the same SH induction medium without acetosyringinone but with a suitable selection agent and suitable antibiotic to inhibit Agrobacterium growth. After several weeks, somatic embryos are transferred to BOi2Y development medium containing no growth regulators, no antibiotics, and 50 g/L sucrose. Somatic embryos are subsequently germinated on half-strength Murashige-Skoog medium. Rooted seedlings were transplanted into pots and grown in a greenhouse. T1 seeds are produced from plants that exhibit tolerance to the selection agent and that contain a single copy of the T-DNA insert.

### Example 5

### Evaluation Setup of AZ Expression in Rice Under the Control of the Rice WSI18 Promoter

[0823] Approximately 15 to 20 independent T0 rice transformants were generated. The primary transformants were transferred from a tissue culture chamber to a greenhouse for growing and harvest of T1 seed. Seven events, of which the T1 progeny segregated 3:1 for presence/absence of the transgene, were retained. For each of these events, approximately 10 T1 seedlings containing the transgene (hetero- and homo-zygotes) and approximately 10 T1 seedlings lacking the transgene (nullizygotes) were selected by monitoring visual marker expression. The selected T1 plants were transferred to a greenhouse. Each plant received a unique barcode label to link unambiguously the phenotyping data to the corresponding plant. The selected T1 plants were grown on soil in 10 cm diameter, specially designed pots with transparent bottoms to allow visualization of the roots, under the following environmental settings: photoperiod=11.5 h, daylight intensity=30,000 lux or more, daytime temperature=28° C., night time temperature=22° C., relative humidity=60-70%. Transgenic plants and the corresponding nullizygotes were grown side-by-side at random positions. Care was taken that the plants were not subjected to any stress. From the stage of sowing until the stage of maturity the plants were passed several times through a digital imaging cabinet. At each time point digital images (2048×1536 pixels, 16 million colours) were taken of each plant from at least 6 different angles. A digital camera also recorded images through the bottom of the pot during plant growth.

### Drought Screen

[0824] Plants from T2 seeds are grown in potting soil under normal conditions until they approached the heading stage. They are then transferred to a “dry” section where irrigation is withheld. Humidity probes are inserted in randomly chosen pots to monitor the soil water content (SWC). When SWC goes below certain thresholds, the plants are automatically re-watered continuously until a normal level was reached again. The plants are then re-transferred again to normal conditions. The rest of the cultivation (plant maturation, seed harvest) is the same as for plants not grown under abiotic stress conditions. Growth and yield parameters are recorded as detailed for growth under normal conditions.

### Nitrogen Use Efficiency Screen

[0825] Rice plants from T2 seeds are grown in potting soil under normal conditions except for the nutrient solution. The pots are watered from transplantation to maturation with a specific nutrient solution containing reduced N nitrogen (N) content, usually between 7 to 8 times less. The rest of the cultivation (plant maturation, seed harvest) is the same as for plants not grown under abiotic stress. Growth and yield parameters are recorded as detailed for growth under normal conditions.

[0826] The plant aboveground area (or leafy biomass) was determined by counting the total number of pixels on the digital images from aboveground plant parts discriminated from the background. This value was averaged for the pictures taken on the same time point from the different angles and was converted to a physical surface value expressed in square mm by calibration. Experiments show that the aboveground plant area measured this way correlates with the biomass of plant parts above ground. The above ground area is the time point at which the plant had reached its maximal leafy biomass. Root features such as total projected area (which can be correlated to total root volume), average diameter and length of roots above a certain thickness threshold (length of thick roots, or length of thin roots) were deduced from the generated image using appropriate software.

[0827] The mature primary panicles were harvested, bagged, barcode-labelled and then dried for three days in the oven at 37° C. The panicles were then threshed and all the seeds collected. The filled husks were separated from the empty ones using an air-blowing device. After separation, both seed lots were then counted using a commercially available counting machine. The empty husks were discarded. The filled husks were weighed on an analytical balance and the cross-sectional area of the seeds was measured using digital imaging. This procedure resulted in the set of the following seed-related parameters:

[0828] The number of filled seeds was determined by counting the number of filled husks that remained after the separation step. The total seed yield (total seed weight) was measured by weighing all filled husks harvested from a plant. Total seed number per plant was measured by counting the number of husks harvested from a plant. The harvest index (HI) in the present invention is defined as the ratio between the total seed yield and the above ground area (mm²), multiplied by a factor 10⁶. Thousand Kernel Weight (TKW) is extrapolated from the number of filled seeds counted and their total weight. The seed fill rate as defined in the present invention is the proportion (expressed as a %) of the number of filled seeds over the total number of seeds (or florets). These parameters were derived in an automated way from the digital images using image analysis software and were analysed statistically. Individual seed parameters (including width, length, area, weight) were measured using a custom-made device consisting of two main components, a weighing and imaging device, coupled to software for image analysis.

[0829] A two factor ANOVA (analyses of variance) corrected for the unbalanced design was used as statistical model for the overall evaluation of plant phenotypic characteristics. An F-test was carried out on all the parameters measured of all the plants of all the events transformed with that gene. The F-test was carried out to check for an effect of the gene over all the transformation events and to verify for an overall effect of the gene, also named herein “global gene effect”. If the value of the F test shows that the data are significant, than it is concluded that there is a “gene” effect, meaning that not only presence or the position of the gene is causing the effect. The threshold for significance for a true global gene effect is set at 5% probability level for the F test.

[0830] To check for an effect of the genes within an event, i.e., for a line-specific effect, a t-test was performed within each event using data sets from the transgenic plants and the corresponding null plants. “Null plants” or “null segregants” or “nullizygotes” are the plants treated in the same way as the transgenic plant, but from which the transgene has segregated. Null plants can also be described as the homozygous negative transformed plants. The threshold for significance for the t-test is set at 10% probability level. The results for some events can be above or below this threshold. This is based on the hypothesis that a gene might only have an effect in certain positions in the genome, and that the occurrence of this position-dependent effect is not uncommon. This kind of gene effect is also named herein a “line effect of the gene”. The p-value is obtained by comparing the t-value to the t-distribution or alternatively, by comparing the F-value to the F-distribution. The p-value then gives the probability that the null hypothesis (i.e., that there is no effect of the transgene) is correct.

[0831] The data obtained for AZ in the first experiment were confirmed in a second experiment with T2 plants. Four lines that had the correct expression pattern were selected for further analysis. Seed batches from the positive plants (both hetero- and homozygotes) in T1, were screened by monitoring marker expression. For each chosen event, the heterozygote seed batches were then retained for T2 evaluation. Within each seed batch an equal number of positive and negative plants were grown in the greenhouse for evaluation.

[0832] A total number of 120 AZ transformed plants were evaluated in the T2 generation, that is 30 plants per event of which 15 positives for the transgene, and 15 negatives.

[0833] Because two experiments with overlapping events had been carried out, a combined analysis was performed. This is useful to check consistency of the effects over the two experiments, and if this is the case, to accumulate evidence from both experiments in order to increase confidence in the conclusion. The method used was a mixed-model approach that takes into account the multilevel structure of the data (i.e. experiment-event-segregants). P-values are obtained by comparing likelihood ratio test to chi square distributions.

### Example 6

### Evaluation of AZ Transformants: Measurement of Yield-Related Parameters

[0834] Upon analysis of the seeds as described above, the inventors found that plants transformed with the AZ gene construct had a higher seed yield, expressed as thousand kernel weight, compared to plants lacking the AZ transgene. Furthermore, increased emergence vigour and increased greenness index was observed in plants carrying the transgene compared to the control plants.

[0835] For one of the constructs, thousand-kernel weight was increased with 2.7% in the T1 generation. These positive results were again obtained in the T2 generation (increase of 2.1%). The T2 data were re-evaluated in a combined analysis with the results for the T1 generation, and the obtained p-values showed that the observed effects were highly significant.

### Example 7

### Gene Cloning of AtSYT1

[0836] The Arabidopsis thaliana AtSYT1 gene was amplified by PCR using as template an Arabidopsis thaliana seedling cDNA library (Invitrogen, Paisley, UK). After reverse transcription of RNA extracted from seedlings, the cDNAs were cloned into pCMV Sport 6.0. Average insert size of the bank was 1.5 kb and the original number of clones was of the order of 1.59×10⁷ cfu. Original titer was determined to be 9.6×10⁵ cfu/ml after first amplification of 6×10¹¹ cfu/ml. After plasmid extraction, 200 ng of template was used in a 50 μl PCR mix. Primers prm06681 (SEQ ID NO: 148; sense, start codon in bold, AttB1 site in italic: 5′-GGGGACAAGTTTGTACAAAAAAGCAGGCTTAAACAATGCAACAGCACCTGATG-3′) and prm06682 (SEQ ID NO: 149; reverse, complementary, AttB2 site in italic: 5′-GGGGACCACTTTGTACAAGAAAGCTGGGTCATCATTAAGATTCCTTGTGC-3′), which include the AttB sites for Gateway recombination, were used for PCR amplification. PCR was performed using Hifi Taq DNA polymerase in standard conditions. A PCR fragment of 727 bp (including attB sites) was amplified and purified also using standard methods. The first step of the Gateway procedure, the BP reaction, was then performed, during which the PCR fragment recombines in vivo with the pDONR201 plasmid to produce, according to the Gateway terminology, an “entry clone”, p07466. Plasmid pDONR201 was purchased from Invitrogen, as part of the Gateway® technology.

### Example 8

### Vector Construction

[0837] The entry clone p07466 was subsequently used in an LR reaction with p00640, a destination vector used for plant (Oryza sativa) transformation. This vector contains as functional elements within the T-DNA borders: a plant selectable marker; a screenable marker expression cassette; and a Gateway cassette intended for LR in vivo recombination with the sequence of interest already cloned in the entry clone. A rice GOS2 promoter (SEQ ID NO: 145) for constitutive expression (PRO0129) was located upstream of this Gateway cassette.

[0838] Many different binary (and super binary) vector systems have been described for plant transformation (e.g. An, G. in Agrobacterium Protocols. Methods in Molecular Biology vol 44, pp 47-62, Gartland K M A and M R Davey eds. Humana Press, Totowa, N.J.).

[0839] Many are based on the vector pBIN19 described by Bevan (Nucleic Acid Research. 1984. 12:8711-8721) that includes a plant gene expression cassette flanked by the left and right border sequences from the Ti plasmid of Agrobacterium tumefaciens. A plant gene expression cassette consists of at least two genes—a selection marker gene and a plant promoter regulating the transcription of the cDNA or genomic DNA of the trait gene. Various selection marker genes can be used including the Arabidopsis gene encoding a mutated acetohydroxy acid synthase (AHAS) enzyme (U.S. Pat. No. 5,767,3666 and 6225105). Similarly, various promoters can be used to regulate the trait gene to provide constitutive, developmental, tissue or environmental regulation of gene transcription.

[0840] After the LR recombination step, the resulting expression vector pGOS2::AtSYT1 (FIG. 9) was transformed into Agrobacterium strain LBA4044 using heat shock or electroporation protocols. Transformed colonies were grown on YEP media and selected by respective antibiotics for two days at 28° C. These Agrobacterium cultures were used for the plant transformation.

[0841] Other Agrobacterium tumefaciens strains can be used for plant transformation and are well known in the art. Examples of such strains are C58C1 or EHA105.

### Example 9

### Plant Transformation

### Rice Transformation

[0842] The Agrobacterium containing the expression vector was used to transform Oryza sativa plants. Mature dry seeds of the rice japonica cultivar Nipponbare were dehusked. Sterilization was carried out by incubating for one minute in 70% ethanol, followed by 30 minutes in 0.2% HgCl₂, followed by a 6 times 15 minutes wash with sterile distilled water. The sterile seeds were then germinated on a medium containing 2,4-D (callus induction medium). After incubation in the dark for four weeks, embryogenic, scutellum-derived calli were excised and propagated on the same medium. After two weeks, the calli were multiplied or propagated by subculture on the same medium for another 2 weeks. Embryogenic callus pieces were sub-cultured on fresh medium 3 days before co-cultivation (to boost cell division activity).

[0843] Agrobacterium strain LBA4404 containing the expression vector was used for cocultivation. Agrobacterium was inoculated on AB medium with the appropriate antibiotics and cultured for 3 days at 28° C. The bacteria were then collected and suspended in liquid co-cultivation medium to a density (OD600) of about 1. The suspension was then transferred to a Petri dish and the calli immersed in the suspension for 15 minutes. The callus tissues were then blotted dry on a filter paper and transferred to solidified, co-cultivation medium and incubated for 3 days in the dark at 25° C. Co-cultivated calli were grown on 2,4-D-containing medium for 4 weeks in the dark at 28° C. in the presence of a selection agent. During this period, rapidly growing resistant callus islands developed. After transfer of this material to a regeneration medium and incubation in the light, the embryogenic potential was released and shoots developed in the next four to five weeks. Shoots were excised from the calli and incubated for 2 to 3 weeks on an auxin-containing medium from which they were transferred to soil. Hardened shoots were grown under high humidity and short days in a greenhouse.

[0844] Approximately 35 independent T0 rice transformants were generated for one construct. The primary transformants were transferred from a tissue culture chamber to a greenhouse. After a quantitative PCR analysis to verify copy number of the T-DNA insert, only single copy transgenic plants that exhibit tolerance to the selection agent were kept for harvest of T1 seed. Seeds were then harvested three to five months after transplanting. The method yielded single locus transformants at a rate of over 50% (Aldemita and Hodges 1996, Chan et al. 1993, Hiei et al. 1994).

### Corn Transformation

[0845] Transformation of maize (Zea mays) is performed with a modification of the method described by Ishida et al. (1996) Nature Biotech 14(6): 745-50. Transformation is genotype-dependent in corn and only specific genotypes are amenable to transformation and regeneration. The inbred line A188 (University of Minnesota) or hybrids with A188 as a parent are good sources of donor material for transformation, but other genotypes can be used successfully as well. Ears are harvested from corn plant approximately 11 days after pollination (DAP) when the length of the immature embryo is about 1 to 1.2 mm. Immature embryos are cocultivated with Agrobacterium tumefaciens containing the expression vector, and transgenic plants are recovered through organogenesis. Excised embryos are grown on callus induction medium, then maize regeneration medium, containing the selection agent (for example imidazolinone but various selection markers can be used). The Petri plates are incubated in the light at 25° C. for 2-3 weeks, or until shoots develop. The green shoots are transferred from each embryo to maize rooting medium and incubated at 25° C. for 2-3 weeks, until roots develop. The rooted shoots are transplanted to soil in the greenhouse. T1 seeds are produced from plants that exhibit tolerance to the selection agent and that contain a single copy of the T-DNA insert.

### Wheat Transformation

[0846] Transformation of wheat is performed with the method described by Ishida et al. (1996) Nature Biotech 14(6): 745-50. The cultivar Bobwhite (available from CIMMYT, Mexico) is commonly used in transformation. Immature embryos are co-cultivated with Agrobacterium tumefaciens containing the expression vector, and transgenic plants are recovered through organogenesis. After incubation with Agrobacterium, the embryos are grown in vitro on callus induction medium, then regeneration medium, containing the selection agent (for example imidazolinone but various selection markers can be used). The Petri plates are incubated in the light at 25° C. for 2-3 weeks, or until shoots develop. The green shoots are transferred from each embryo to rooting medium and incubated at 25° C. for 2-3 weeks, until roots develop. The rooted shoots are transplanted to soil in the greenhouse. T1 seeds are produced from plants that exhibit tolerance to the selection agent and that contain a single copy of the T-DNA insert.

### Soybean Transformation

[0847] Soybean is transformed according to a modification of the method described in the Texas A&M patent U.S. Pat. No. 5,164,310. Several commercial soybean varieties are amenable to transformation by this method. The cultivar Jack (available from the Illinois Seed foundation) is commonly used for transformation. Soybean seeds are sterilised for in vitro sowing. The hypocotyl, the radicle and one cotyledon are excised from seven-day old young seedlings. The epicotyl and the remaining cotyledon are further grown to develop axillary nodes. These axillary nodes are excised and incubated with Agrobacterium tumefaciens containing the expression vector. After the cocultivation treatment, the explants are washed and transferred to selection media. Regenerated shoots are excised and placed on a shoot elongation medium. Shoots no longer than 1 cm are placed on rooting medium until roots develop. The rooted shoots are transplanted to soil in the greenhouse. T1 seeds are produced from plants that exhibit tolerance to the selection agent and that contain a single copy of the T-DNA insert.

### Rapeseed/Canola Transformation

[0848] Cotyledonary petioles and hypocotyls of 5-6 day old young seedling are used as explants for tissue culture and transformed according to Babic et al. (1998, Plant Cell Rep 17: 183-188). The commercial cultivar Westar (Agriculture Canada) is the standard variety used for transformation, but other varieties can also be used. Canola seeds are surface-sterilized for in vitro sowing. The cotyledon petiole explants with the cotyledon attached are excised from the in vitro seedlings, and inoculated with Agrobacterium (containing the expression vector) by dipping the cut end of the petiole explant into the bacterial suspension. The explants are then cultured for 2 days on MSBAP-3 medium containing 3 mg/l BAP, 3% sucrose, 0.7 Phytagar at 23° C., 16 hr light. After two days of co-cultivation with Agrobacterium, the petiole explants are transferred to MSBAP-3 medium containing 3 mg/l BAP, cefotaxime, carbenicillin, or timentin (300 mg/l) for 7 days, and then cultured on MSBAP-3 medium with cefotaxime, carbenicillin, or timentin and selection agent until shoot regeneration. When the shoots are 5-10 mm in length, they are cut and transferred to shoot elongation medium (MSBAP-0.5, containing 0.5 mg/l BAP). Shoots of about 2 cm in length are transferred to the rooting medium (MS0) for root induction. The rooted shoots are transplanted to soil in the greenhouse. T1 seeds are produced from plants that exhibit tolerance to the selection agent and that contain a single copy of the T-DNA insert.

### Alfalfa Transformation

[0849] A regenerating clone of alfalfa (Medicago sativa) is transformed using the method of (McKersie et al., 1999 Plant Physiol 119: 839-847). Regeneration and transformation of alfalfa is genotype dependent and therefore a regenerating plant is required. Methods to obtain regenerating plants have been described. For example, these can be selected from the cultivar Rangelander (Agriculture Canada) or any other commercial alfalfa variety as described by Brown D C W and A Atanassov (1985. Plant Cell Tissue Organ Culture 4: 111-112). Alternatively, the RA3 variety (University of Wisconsin) has been selected for use in tissue culture (Walker et al., 1978 Am J Bot 65:654-659). Petiole explants are cocultivated with an overnight culture of Agrobacterium tumefaciens C58C1 pMP90 (McKersie et al., 1999 Plant Physiol 119: 839-847) or LBA4404 containing the expression vector. The explants are cocultivated for 3 d in the dark on SH induction medium containing 288 mg/L Pro, 53 mg/L thioproline, 4.35 g/L K2SO4, and 100 μm acetosyringinone. The explants are washed in half-strength Murashige-Skoog medium (Murashige and Skoog, 1962) and plated on the same SH induction medium without acetosyringinone but with a suitable selection agent and suitable antibiotic to inhibit Agrobacterium growth. After several weeks, somatic embryos are transferred to BOi2Y development medium containing no growth regulators, no antibiotics, and 50 g/L sucrose. Somatic embryos are subsequently germinated on half-strength Murashige-Skoog medium. Rooted seedlings were transplanted into pots and grown in a greenhouse. T1 seeds are produced from plants that exhibit tolerance to the selection agent and that contain a single copy of the T-DNA insert.

### Example 10

### Evaluation Setup of AtSYT1 Transgenic Rice Plants Under Abiotic Stress

[0850] Four events, of which the T1 progeny segregated 3:1 for presence/absence of the transgene, were retained. For each of these events, approximately 15 T1 seedlings containing the transgene (hetero- and homo-zygotes) and approximately 15 T1 seedlings lacking the transgene (nullizygotes) were selected by monitoring visual marker expression. The transgenic plants and the corresponding nullizygotes were grown side-by-side at random positions. Greenhouse conditions were of shorts days (12 hours light), with temperatures on average 28° C. in the light and 22° C. in the dark, and a relative humidity on average of 70%.

### Salt Stress Screen

[0851] Plants were grown on a substrate made of coco fibers and argex (3 to 1 ratio). A normal nutrient solution was used during the first two weeks after transplanting the plantlets in the greenhouse. After the first two weeks, 25 mM of salt (NaCl) was added to the nutrient solution, until the plants were harvested. Seed-related parameters were then measured.

### Drought Screen

[0852] Plants are grown in potting soil under normal conditions until they approach the heading stage. They are then transferred to a “dry” section where irrigation is withheld. Humidity probes are inserted in randomly chosen pots to monitor the soil water content (SWC). When SWC goes below certain thresholds, the plants are automatically re-watered continuously until a normal level is reached again. The plants are then re-transferred again to normal conditions. The rest of the cultivation (plant maturation, seed harvest) is the same as for plants not grown under abiotic stress conditions. Seed-related parameters are then measured

[0853] An alternative method to impose water stress on the transgenic plants is by treatment with water containing an osmolyte such as polyethylene glycol (PEG) at specific water potential. Since PEG may be toxic, the plants are given only a short-term exposure and then normal watering is resumed.

### Reduced Nutrient (Nitrogen) Availability Screen

[0854] The rice plants are grown in potting soil under normal conditions except for the nutrient solution. The pots are watered from transplantation to maturation with a specific nutrient solution containing reduced N nitrogen (N) content, usually between 7 to 8 times less. The rest of the cultivation (plant maturation, seed harvest) is the same as for plants not grown under abiotic stress. Seed-related parameters are then measured

### Statistical Analysis: F-Test

[0855] A two factor ANOVA (analysis of variants) was used as a statistical model for the overall evaluation of plant phenotypic characteristics. An F-test was carried out on all the parameters measured of all the plants of all the events transformed with the gene of the present invention. The F-test was carried out to check for an effect of the gene over all the transformation events and for an overall effect of the gene, also known as a global gene effect. The threshold for significance for a true global gene effect was set at a 5% probability level for the F-test. A significant F-test value points to a gene effect, meaning that it is not only the presence or position of the gene that is causing the differences in phenotype.

### Biomass-Related Parameter Measurement

[0856] From the stage of sowing until the stage of maturity the plants were passed several times through a digital imaging cabinet. At each time point digital images (2048×1536 pixels, 16 million colours) were taken of each plant from at least 6 different angles.

[0857] The plant aboveground area (or leafy biomass) was determined by counting the total number of pixels on the digital images from aboveground plant parts discriminated from the background. This value was averaged for the pictures taken on the same time point from the different angles and was converted to a physical surface value expressed in square mm by calibration. Experiments show that the aboveground plant area measured this way correlates with the biomass of plant parts above ground. The above ground area is the time point at which the plant had reached its maximal leafy biomass. The early vigour is the plant (seedling) aboveground area three weeks post-germination.

### Seed-Related Parameter Measurements

[0858] The mature primary panicles were harvested, counted, bagged, barcode-labeled and then dried for three days in an oven at 37° C. The panicles were then threshed and all the seeds were collected and counted. The filled husks were separated from the empty ones using an air-blowing device. The empty husks were discarded and the remaining fraction was counted again. The filled husks were weighed on an analytical balance. The number of filled seeds was determined by counting the number of filled husks that remained after the separation step. The total seed yield was measured by weighing all filled husks harvested from a plant. Total seed number per plant was measured by counting the number of husks harvested from a plant. Thousand kernel weight (TKW) is extrapolated from the number of filled seeds counted and their total weight. The harvest index (HI) in the present invention is defined as the ratio between the total seed yield and the above ground area (mm²), multiplied by a factor 10⁶. The total number of flowers per panicle as defined in the present invention is the ratio between the total number of seeds and the number of mature primary panicles. The seed fill rate as defined in the present invention is the proportion (expressed as a %) of the number of filled seeds over the total number of seeds (or florets).

### Example 11

### Results of the Evaluation of AtSYT1 Transgenic Rice Plants Under Abiotic Stress (Salt Stress)

[0859] The results of the evaluation of AtSYT1 transgenic rice plants submitted to salt stress are presented in Table B. The percentage difference between the transgenics and the corresponding nullizygotes is also shown, with a P value from the F test below 0.05.

[0860] Aboveground biomass, early vigour, total seed yield, number of filled seeds, seed fill rate, TKW and harvest index are significantly increased in the AtSYT1 transgenic plants compared to the control plants (in this case, the nullizygotes), under abiotic stress.

TABLE B
Results of the evaluation of AtSYT1 transgenic rice plants under
abiotic stress.

| Trait | % Difference |
|---|---|
| Aboveground biomass | 19 |
| Early vigour | 18 |
| Total seed yield | 30 |
| Nbr of filled seeds | 18 |
| Fill rate | 15 |
| TKW | 10 |
| Harvest index | 16 |

### Example 12

### Identification of Sequences Related to SEQ ID NO: 154 and SEQ ID NO: 155

[0861] Sequences (full length cDNA, ESTs or genomic) related to SEQ ID NO: 154 and SEQ ID NO: 155 were identified amongst those maintained in the Entrez Nucleotides database at the National Center for Biotechnology Information (NCBI) using database sequence search tools, such as the Basic Local Alignment Tool (BLAST) (Altschul et al. (1990) J. Mol. Biol. 215:403-410; and Altschul et al. (1997) Nucleic Acids Res. 25:3389-3402). The program is used to find regions of local similarity between sequences by comparing nucleic acid or polypeptide sequences to sequence databases and by calculating the statistical significance of matches. The polypeptide encoded by SEQ ID NO: 154 was used for the TBLASTN algorithm, with default settings and the filter to ignore low complexity sequences set off. The output of the analysis was viewed by pairwise comparison, and ranked according to the probability score (E-value), where the score reflects the probability that a particular alignment occurs by chance (the lower the E-value, the more significant the hit). In addition to E-values, comparisons were also scored by percentage identity. Percentage identity refers to the number of identical nucleotides (or amino acids) between the two compared nucleic acid (or polypeptide) sequences over a particular length. In some instances, the default parameters may be adjusted to modify the stringency of the search.

[0862] In addition to the publicly available nucleic acid sequences available at NCBI, proprietary sequence databases are also searched following the same procedure as described herein above.

[0863] Table C provides a list of nucleic acid sequences related to the nucleic acid sequence as represented by SEQ ID NO: 154.

TABLE C
Nucleic acid sequences related to the nucleic acid sequence (SEQ ID NO: 154)
useful in the methods of the present invention, and the corresponding deduced polypeptides.

| | | Nucleic | | Database | |
|---|---|---|---|---|---|
| | Source | acid SEQ | Polypeptide | accession | |
| Name | organism | ID NO: | SEQ ID NO: | number | Status |
| Chlre_cpFBPase | Chlamydomonas | 154 | 155 | Derived from | Full length |
| | reinhardtii | | | AW721488 | |
| | | | | BQ811919 | |
| | | | | CF555540 | |
| Bigna_cpFBPase | Bigelowiella | 156 | 157 | AY267678 | Full length |
| | natans | | | | |
| Aqufo_cpFBPase | Aquilegia | 158 | 159 | DR944021 | Full length |
| | formosa × | | | DT749545 | |
| | Aquilegia | | | | |
| | pubescens | | | | |
| Arath_cpFBPase | Arabidopsis | 160 | 161 | X58148 | Full length |
| | thaliana | | | | |
| Brana_cpFBPase | Brassica napus | 162 | 163 | AF081796 | Full length |
| Cyame_cpFBPase | Cyanidioschyzon | 164 | 165 | CMO245C* | Full length |
| | merolae | | | | |
| Glyma_cpFBPase | Glycine max | 166 | 167 | L34841 | Full length |
| Lyces_cpFBPase | Lycopersicon | 168 | 169 | BT014319 | Full length |
| | esculentum | | | | |
| Medtr_cpFBPase | Medicago | 170 | 171 | BI310407 | Full length |
| | truncatula | | | BI265103 | |
| | | | | CO516140 | |
| Nicta_cpFBPase | Nicotiana | 172 | 173 | DW000613 | Full length |
| | tabacum | | | EB680028 | |
| Orysa_cpFBPase | Oryza sativa | 174 | 175 | AB007194 | Full length |
| Ostlu_cpFBPase | Ostreococcus | 176 | 177 | jgi\|Ost9901_3\|92356\| | Full length |
| | lucimarinus | | | ost_03_002_042** | |
| Ostta_cpFBPase | Ostreococcus | 178 | 179 | CR954203 | Full length |
| | tauri | | | | |
| Phatr_cpFBPase | Phaeodactylum | 180 | 181 | scaffold_27: | Full length |
| | tricornutum | | | 145102-145476** | |
| Pissa_cpFBPase | Pisum sativa | 182 | 183 | L34806 | Full length |
| Pontr_cpFBPase | Poncirus | 184 | 185 | CV705787 | Full length |
| | trifoliata | | | CV705786 | |
| Poptr_cpFBPase | Populus | 186 | 187 | CV241715 | Full length |
| | tremuloides | | | DT474034 | |
| Soltu_cpFBPase | Solanum | 188 | 189 | AF1340451 | Full length |
| | tuberosum | | | | |
| Spiol_cpFBPase | Spinacia | 190 | 191 | L76555 | Full length |
| | oleracea | | | | |
| Triae_cpFBPase | Triticum | 192 | 193 | X07780 | Full length |
| | aestivum | | | | |
| Zeama_cpFBPase | Zea mays | 194 | 195 | DR792524.1 | Full length |
| | | | | DT645374.1 | |
| Phypa_cpFBPase | Physicomitrella | 196 | 197 | BY991118.1 | Full length |
| | patens | | | BJ168552.1 + | |
| | | | | proprietary | |
| Galsu_cpFBPase | Galderia | 198 | 199 | AJ302644 | Partial |
| | sulphuraria | | | | |
| Marpo_cpFBPase | Marchantia | 200 | 201 | BJ862191 | Partial |
| | polymorpha | | | | |
| Tagpa_cpFBPase | Tagetes patula | 202 | 203 | Contig | Partial |
| | | | | CON_01b- | |
| | | | | cs_scarletade- | |
| | | | | 4-e3.b1 | |
| | | | | proprietary | |
| Linus_cpFBPase | 204 | 204 | 205 | contig6298 | Partial |
| | | | | proprietary | |

*Cyanidioschyzon merolae database at the Department of Biological Science, University of Tokyo
**Ostreococcus lucimarinus and Phaeodactylum tricornutum databases at the DOE Joint Genome Institute, US Department of Energy

### Example 13

### Alignment of Relevant Polypeptide Sequences

[0864] AlignX from the Vector NTI (Invitrogen) is based on the popular Clustal algorithm of progressive alignment (Thompson et al. (1997) Nucleic Acids Res 25:4876-4882; Chenna et al. (2003). Nucleic Acids Res 31:3497-3500). A phylogenetic tree can be constructed using a neighbour-joining clustering algorithm. Default values are for the gap open penalty of 10, for the gap extension penalty of 0.1 and the selected weight matrix is Blosum 62 (if polypeptides are aligned).

[0865] The result of the multiple sequence alignment using polypeptides relevant in identifying the ones useful in performing the methods of the invention is shown in FIG. 12 of the present application. Chloroplastic FBPase polypeptides (cpFBPase) differ from cytoplasmic FBPase (cyFBPase) polypeptides by the presence of a transit peptide at their N-terminus for plastidic (chloroplastic) subcellular targeting (boxed in the figure). In addition, the former contain an insertion of amino acids (also boxed, and named redox regulatory insertion) comprising at least two cysteine residues necessary for disulphide bridge formation (i.e. redox regulation). The conserved cysteines are named after their position in the mature pea (Pisum sativa) cpFBPase polypeptide, i.e. Cys153, Cys173 and Cys178. Cys153 and Cys173 usually are the two partners involved in disulphide bridge formation (Chiadmi et al. (1999) EMBO J 18(23): 6809-6815). The active site motif of cpFBPase as defined in the Prosite database is PS00124 and corresponds to the following amino acid sequence: [AG]-[RK]-[LI]-X(1,2)-[LIV]-[FY]-E-X(2)-P-[LIVM]-[GSA] (SEQ ID NO: 358), wherein [RK] is the active site that binds and X any amino acid. The predicted active site motif and predicted active site itself (comprised within the motif) have also been boxed in FIG. 12. Also identified in FIG. 12 are amino acid residues Asn237, Tyr269, Tyr289 and Arg268 which bind the 6-phosphate of fructose-1,6-bisphosphate, and Lys299 which binds the fructose (Chiadmi et al. (1999) EMBO J 18(23): 6809-6815). These latter are also numbered after their position in the mature pea (Pisum sativa) cpFBPase polypeptide.

### Example 14

### Calculation of Global Percentage Identity Between Polypeptide Sequences Useful in Performing the Methods of the Invention

[0866] Global percentages of similarity and identity between full length polypeptide sequences useful in performing the methods of the invention were determined using one of the methods available in the art, the MatGAT (Matrix Global Alignment Tool) software (BMC Bioinformatics. 2003 4:29. MatGAT: an application that generates similarity/identity matrices using protein or DNA sequences. Campanella J J, Bitincka L, Smalley J; software hosted by Ledion Bitincka). MatGAT software generates similarity/identity matrices for DNA or protein sequences without needing pre-alignment of the data. The program performs a series of pair-wise alignments using the Myers and Miller global alignment algorithm (with a gap opening penalty of 12, and a gap extension penalty of 2), calculates similarity and identity using for example Blosum 62 (for polypeptides), and then places the results in a distance matrix. Sequence similarity is shown in the bottom half of the dividing line and sequence identity is shown in the top half of the diagonal dividing line.

[0867] Parameters used in the comparison were:
[0868] Scoring matrix: Blosum62
[0869] First Gap: 12
[0870] Extending gap: 2

[0871] Results of the software analysis are shown in Table D for the global similarity and identity over the full length of the polypeptide sequences (excluding the partial polypeptide sequences). Percentage identity is given above the diagonal and percentage similarity is given below the diagonal.

[0872] The percentage identity between the polypeptide sequences useful in performing the methods of the invention can be as low as 40% amino acid identity compared to SEQ ID NO: 155.

TABLE D
MatGAT results for global similarity and identity over the full length of the polypeptide sequences.

| | 1 | 2 | 3 | 4 | 5 | 6 | 7 | 8 | 9 | 10 | 11 | 12 | 13 | 14 | 15 | 16 | 17 | 18 | 19 | 20 | 21 | 22 |
|---|---|---|---|---|---|---|---|---|---|---|---|---|---|---|---|---|---|---|---|---|---|---|
| 1. Arath_cpFBPase | | 79 | 67 | 76 | 51 | 62 | 42 | 40 | 79 | 74 | 74 | 79 | 92 | 60 | 80 | 79 | 80 | 58 | 42 | 39 | 16 | 35 |
| 2. Soltu_cpFBPase | 87 | | 69 | 77 | 51 | 62 | 43 | 41 | 79 | 76 | 74 | 82 | 80 | 58 | 82 | 94 | 97 | 58 | 42 | 40 | 15 | 36 |
| 3. Phymi_cpFBPase | 81 | 81 | | 69 | 50 | 62 | 42 | 41 | 67 | 70 | 68 | 69 | 68 | 60 | 68 | 68 | 69 | 60 | 41 | 38 | 13 | 34 |
| 4. Orysa_cpFBPase | 85 | 86 | 81 | | 52 | 65 | 43 | 41 | 76 | 85 | 88 | 78 | 78 | 59 | 77 | 77 | 78 | 57 | 41 | 39 | 16 | 35 |
| 5. Bigna_cpFBPase | 68 | 68 | 67 | 69 | | 52 | 49 | 42 | 51 | 51 | 51 | 51 | 51 | 52 | 52 | 52 | 50 | 51 | 43 | 40 | 16 | 36 |
| 6. Chlre_cpFBPase | 75 | 73 | 76 | 76 | 66 | | 45 | 41 | 61 | 63 | 63 | 63 | 64 | 63 | 62 | 62 | 63 | 61 | 42 | 40 | 17 | 33 |
| 7. Phatr_cpFBPase | 61 | 60 | 61 | 61 | 64 | 61 | | 42 | 44 | 45 | 44 | 44 | 42 | 47 | 43 | 42 | 43 | 48 | 40 | 35 | 15 | 32 |
| 8. Cyame_cpFBPase | 59 | 61 | 59 | 60 | 61 | 60 | 59 | | 41 | 41 | 41 | 41 | 40 | 41 | 42 | 41 | 42 | 41 | 36 | 32 | 15 | 34 |
| 9. Pissa_cpFBPase | 86 | 89 | 80 | 84 | 68 | 72 | 60 | 59 | | 73 | 75 | 83 | 79 | 59 | 81 | 80 | 80 | 56 | 41 | 39 | 15 | 35 |
| 10. Triae_cpFBPase | 83 | 85 | 81 | 90 | 67 | 74 | 60 | 61 | 83 | | 81 | 75 | 75 | 61 | 74 | 74 | 75 | 60 | 41 | 39 | 15 | 35 |
| 11. Zeama_cpFBPase | 84 | 84 | 81 | 92 | 68 | 76 | 61 | 60 | 84 | 89 | | 75 | 76 | 59 | 75 | 75 | 76 | 57 | 40 | 38 | 15 | 33 |
| 12. Pontr_cpFBPase | 88 | 90 | 81 | 84 | 67 | 74 | 62 | 61 | 92 | 84 | 84 | | 80 | 59 | 85 | 82 | 82 | 56 | 41 | 40 | 16 | 35 |
| 13. Brana_cpFBPase | 96 | 87 | 81 | 86 | 67 | 76 | 60 | 60 | 87 | 85 | 85 | 87 | | 59 | 81 | 80 | 80 | 57 | 42 | 39 | 15 | 36 |
| 14. Ostta_cpFBPase | 72 | 71 | 72 | 73 | 69 | 73 | 60 | 57 | 72 | 71 | 72 | 71 | 71 | | 58 | 58 | 59 | 85 | 45 | 44 | 15 | 38 |
| 15. Poptr_cpFBPase | 89 | 89 | 82 | 85 | 67 | 73 | 63 | 60 | 89 | 84 | 84 | 91 | 88 | 71 | | 82 | 82 | 56 | 41 | 39 | 13 | 35 |
| 16. Nicta_cpFBPase | 87 | 98 | 81 | 85 | 68 | 73 | 59 | 61 | 88 | 84 | 86 | 89 | 87 | 70 | 89 | | 93 | 57 | 41 | 40 | 15 | 36 |
| 17. Lyces_cpFBPase | 86 | 98 | 80 | 86 | 67 | 73 | 61 | 60 | 89 | 85 | 85 | 89 | 86 | 72 | 89 | 96 | | 58 | 42 | 40 | 16 | 36 |
| 18. Ostlu_cpFBPase | 72 | 70 | 72 | 73 | 66 | 72 | 60 | 58 | 72 | 72 | 71 | 70 | 73 | 91 | 71 | 70 | 72 | | 44 | 43 | 16 | 37 |
| 19. Arath_cyFBPase | 56 | 57 | 56 | 56 | 58 | 57 | 53 | 50 | 56 | 56 | 56 | 55 | 57 | 60 | 55 | 56 | 57 | 61 | | 48 | 16 | 42 |
| 20. Euggr_cyFBPase | 57 | 57 | 57 | 59 | 57 | 58 | 57 | 51 | 57 | 58 | 57 | 56 | 58 | 63 | 58 | 56 | 58 | 61 | 63 | | 15 | 35 |
| 21. Synec_FBPase | 31 | 30 | 30 | 31 | 31 | 34 | 31 | 30 | 31 | 28 | 30 | 30 | 31 | 29 | 29 | 29 | 31 | 32 | 32 | 32 | | 16 |
| SBPase | | | | | | | | | | | | | | | | | | | | | | |
| 22. Synec_FBPasell | 52 | 53 | 53 | 53 | 52 | 51 | 47 | 45 | 52 | 52 | 51 | 52 | 52 | 57 | 52 | 53 | 54 | 57 | 61 | 53 | 33 | |

### Example 15

### Identification of Domains Comprised in Polypeptide Sequences Useful in Performing the Methods of the Invention

[0873] The Integrated Resource of Protein Families, Domains and Sites (InterPro) database is an integrated interface for the commonly used signature databases for text- and sequence-based searches. The InterPro database combines these databases, which use different methodologies and varying degrees of biological information about well-characterized proteins to derive protein signatures. Collaborating databases include SWISS-PROT, PROSITE, TrEMBL, PRINTS, ProDom and Pfam, Smart and TIGRFAMs. Interpro is hosted at the European Bioinformatics Institute in the United Kingdom.

[0874] The results of the InterPro scan of the polypeptide sequence as represented by SEQ ID NO: 155 are presented in Table E.

TABLE E
InterPro scan results of the polypeptide sequence as represented by
SEQ ID NO: 155

| | Accession | |
|---|---|---|
| Database | number | Accession name |
| InterPro | IPR000146 | Inositol phosphatase/fructose-1,6- |
| | | bisphosphatase |
| ProDom | PD001491 | Inositol phosphatase/fructose-1,6- |
| | | bisphosphatase |
| PRINTS | PR00115 | FBPHPHTASE |
| PIR | PIRSF000904 | Fructose-1,6-bisphosphatase/ |
| superfamily | | sedoheptulose-1,7-bisphosphatase |
| PANTHER | PTHR11556 | FRUCTOSE-1,6-BISPHOSPHATASE- |
| | | RELATED |
| Pfam | PF00316 | FBPase |
| PROFILE | PS00124 | FBPASE active site |
| PROSITE | PS00124 | FBPASE active site |

### Example 16

### Topology Prediction of the Polypeptide Sequences Useful in Performing the Methods of the Invention (Subcellular Localization, Transmembrane)

[0875] TargetP 1.1 predicts the subcellular location of eukaryotic proteins. The location assignment is based on the predicted presence of any of the N-terminal pre-sequences: chloroplast transit peptide (cTP), mitochondrial targeting peptide (mTP) or secretory pathway signal peptide (SP). Scores on which the final prediction is based are not really probabilities, and they do not necessarily add to one. However, the location with the highest score is the most likely according to TargetP, and the relationship between the scores (the reliability class) may be an indication of how certain the prediction is. The reliability class (RC) ranges from 1 to 5, where 1 indicates the strongest prediction. TargetP is maintained at the server of the Technical University of Denmark.

[0876] For the sequences predicted to contain an N-terminal presequence a potential cleavage site can also be predicted.

[0877] A number of parameters were selected, such as organism group (non-plant or plant), cutoff sets (none, predefined set of cutoffs, or user-specified set of cutoffs), and the calculation of prediction of cleavage sites (yes or no).

[0878] The results of TargetP 1.1 analysis of the polypeptide sequence as represented by SEQ ID NO: 155 are presented Table F. The “plant” organism group has been selected, no cutoffs defined, and the predicted length of the transit peptide requested. The subcellular localization of the polypeptide sequence as represented by SEQ ID NO: 155 is the chloroplast, and the predicted length of the transit peptide is of 56 amino acids starting from the N-terminus (not as reliable as the prediction of the subcellular localization itself, may vary in length of a few amino acids). The mature pea cpFBPase has a transit peptide of 53 amino acids in length. When aligning the pea cpFBPase and the cpFBPase of SEQ ID NO: 155, it is possible to deduce the length of the transit peptide in the latter, also of 53 amino acids.

TABLE F
TargetP 1.1 analysis of the polypeptide sequence as represented
by SEQ ID NO: 155

| | |
|---|---|
| Length (AA) | 415 |
| Chloroplastic transit peptide | 0.832 |
| Mitochondrial transit peptide | 0.106 |
| Secretory pathway signal peptide | 0.003 |
| Other subcellular targeting | 0.065 |
| Predicted Location | Chloroplastic |
| Reliability class | 2 |
| Predicted transit peptide length | 56 |

[0879] Many other algorithms can be used to perform such analyses, including:
[0880] ChloroP 1.1 hosted on the server of the Technical University of Denmark;
[0881] Protein Prowler Subcellular Localisation Predictor version 1.2 hosted on the server of the Institute for Molecular Bioscience, University of Queensland, Brisbane, Australia;
[0882] PENCE Proteome Analyst PA-GOSUB 2.5 hosted on the server of the University of Alberta, Edmonton, Alberta, Canada;

### Example 17

### Assay Related to the Polypeptide Sequences Useful in Performing the Methods of the Invention

[0883] Polypeptide sequence as represented by SEQ ID NO: 155 is an enzyme with as Enzyme Commission (EC; classification of enzymes by the reactions they catalyse) number EC 3.1.3.11 for fructose-bisphosphatase (also called D-fructose-1,6-bisphosphate 1-phosphohydrolase). The functional assay maybe an assay for FBPase activity based on a colorimetric Pi assay, as described by Huppe and Buchanan (1989) in Naturforsch. 44c: 487-494. Other methods to assay the enzymatic activity are described by Alscher-Herman (1982) in Plant Physiol 70: 728-734.

### Example 18

### Cloning of Nucleic Acid Sequence as Represented by SEQ ID NO: 154

[0884] Unless otherwise stated, recombinant DNA techniques are performed according to standard protocols described in (Sambrook (2001) Molecular Cloning: a laboratory manual, 3rd Edition Cold Spring Harbor Laboratory Press, CSH, New York) or in Volumes 1 and 2 of Ausubel et al. (1994), Current Protocols in Molecular Biology, Current Protocols. Standard materials and methods for plant molecular work are described in Plant Molecular Biology Labfax (1993) by R. D. D. Croy, published by BIOS Scientific Publications Ltd (UK) and Blackwell Scientific Publications (UK).

[0885] The nucleic acid sequence used in the methods of the invention was amplified by PCR using as template a Chlamydomonas reinhardtii CC-1690 cDNA library (“Core Library”) (in Lambda ZAP II vector from Stratagene) purchased at the Chlamy Center (formerly the Chlamydomonas Genetics Center) at Duke University, North Carolina, USA. PCR was performed using Hifi Taq DNA polymerase in standard conditions, using 200 ng of template in a 50 μl PCR mix. The primers used were

prm08448 SEQ ID NO: 206; sense, AttB1 site in lower case:
5′-ggggacaagtttgtacaaaaaagcaggcttaaacaatggccgccaccatg-3′; and
prm08449 (SEQ ID NO: 207; reverse, complementary, AttB2 site in lower case:
5′-ggggaccactttgtacaagaaagctgggtagctgcttagtgcttcttggt-3′,
which include the AttB sites for Gateway recombination. The amplified PCR fragment was purified also using standard methods. The first step of the Gateway procedure, the BP reaction, was then performed, during which the PCR fragment recombines in vivo with the pDONR201 plasmid to produce, according to the Gateway terminology, an “entry clone”, p15972. Plasmid pDONR201 was purchased from Invitrogen, as part of the Gateway® technology.

### Example 19

### Expression Vector Construction Using the Nucleic Acid Sequence as Represented by SEQ ID NO: 154

[0886] The entry clone p15972 was subsequently used in an LR reaction with p05050, a destination vector used for Oryza sativa transformation. This vector contains as functional elements within the T-DNA borders: a plant selectable marker; a screenable marker expression cassette; and a Gateway cassette intended for LR in vivo recombination with the nucleic acid sequence of interest already cloned in the entry clone. A rice GOS2 promoter (SEQ ID NO: 208) for constitutive expression (PRO0129) was located upstream of this Gateway cassette.

[0887] After the LR recombination step, the resulting expression vector pGOS2::FBPase (FIG. 13) was transformed into Agrobacterium strain LBA4044 according to methods well known in the art.

### Example 20

### Plant Transformation

### Rice Transformation

[0888] The Agrobacterium containing the expression vector was used to transform Oryza sativa plants. Mature dry seeds of the rice japonica cultivar Nipponbare were dehusked. Sterilization was carried out by incubating for one minute in 70% ethanol, followed by 30 minutes in 0.2% HgCl2, followed by a 6 times 15 minutes wash with sterile distilled water. The sterile seeds were then germinated on a medium containing 2,4-D (callus induction medium). After incubation in the dark for four weeks, embryogenic, scutellum-derived calli were excised and propagated on the same medium. After two weeks, the calli were multiplied or propagated by subculture on the same medium for another 2 weeks. Embryogenic callus pieces were sub-cultured on fresh medium 3 days before co-cultivation (to boost cell division activity).

[0889] Agrobacterium strain LBA4404 containing the expression vector was used for cocultivation. Agrobacterium was inoculated on AB medium with the appropriate antibiotics and cultured for 3 days at 28° C. The bacteria were then collected and suspended in liquid co-cultivation medium to a density (OD600) of about 1. The suspension was then transferred to a Petri dish and the calli immersed in the suspension for 15 minutes. The callus tissues were then blotted dry on a filter paper and transferred to solidified, co-cultivation medium and incubated for 3 days in the dark at 25° C. Co-cultivated calli were grown on 2,4-D-containing medium for 4 weeks in the dark at 28° C. in the presence of a selection agent. During this period, rapidly growing resistant callus islands developed. After transfer of this material to a regeneration medium and incubation in the light, the embryogenic potential was released and shoots developed in the next four to five weeks. Shoots were excised from the calli and incubated for 2 to 3 weeks on an auxin-containing medium from which they were transferred to soil. Hardened shoots were grown under high humidity and short days in a greenhouse.

[0890] Approximately 35 independent T0 rice transformants were generated for one construct. The primary transformants were transferred from a tissue culture chamber to a greenhouse. After a quantitative PCR analysis to verify copy number of the T-DNA insert, only single copy transgenic plants that exhibit tolerance to the selection agent were kept for harvest of T1 seed. Seeds were then harvested three to five months after transplanting. The method yielded single locus transformants at a rate of over 50% (Aldemita and Hodges 1996, Chan et al. 1993, Hiei et al. 1994).

### Corn Transformation

[0891] Transformation of maize (Zea mays) is performed with a modification of the method described by Ishida et al. (1996) Nature Biotech 14(6): 745-50. Transformation is genotype-dependent in corn and only specific genotypes are amenable to transformation and regeneration. The inbred line A188 (University of Minnesota) or hybrids with A188 as a parent are good sources of donor material for transformation, but other genotypes can be used successfully as well. Ears are harvested from corn plant approximately 11 days after pollination (DAP) when the length of the immature embryo is about 1 to 1.2 mm. Immature embryos are cocultivated with Agrobacterium tumefaciens containing the expression vector, and transgenic plants are recovered through organogenesis. Excised embryos are grown on callus induction medium, then maize regeneration medium, containing the selection agent (for example imidazolinone but various selection markers can be used). The Petri plates are incubated in the light at 25° C. for 2-3 weeks, or until shoots develop. The green shoots are transferred from each embryo to maize rooting medium and incubated at 25° C. for 2-3 weeks, until roots develop. The rooted shoots are transplanted to soil in the greenhouse. T1 seeds are produced from plants that exhibit tolerance to the selection agent and that contain a single copy of the T-DNA insert.

### Wheat Transformation

[0892] Transformation of wheat is performed with the method described by Ishida et al. (1996) Nature Biotech 14(6): 745-50. The cultivar Bobwhite (available from CIMMYT, Mexico) is commonly used in transformation. Immature embryos are co-cultivated with Agrobacterium tumefaciens containing the expression vector, and transgenic plants are recovered through organogenesis. After incubation with Agrobacterium, the embryos are grown in vitro on callus induction medium, then regeneration medium, containing the selection agent (for example imidazolinone but various selection markers can be used). The Petri plates are incubated in the light at 25° C. for 2-3 weeks, or until shoots develop. The green shoots are transferred from each embryo to rooting medium and incubated at 25° C. for 2-3 weeks, until roots develop. The rooted shoots are transplanted to soil in the greenhouse. T1 seeds are produced from plants that exhibit tolerance to the selection agent and that contain a single copy of the T-DNA insert.

### Soybean Transformation

[0893] Soybean is transformed according to a modification of the method described in the Texas A&M patent U.S. Pat. No. 5,164,310. Several commercial soybean varieties are amenable to transformation by this method. The cultivar Jack (available from the Illinois Seed foundation) is commonly used for transformation. Soybean seeds are sterilised for in vitro sowing. The hypocotyl, the radicle and one cotyledon are excised from seven-day old young seedlings. The epicotyl and the remaining cotyledon are further grown to develop axillary nodes. These axillary nodes are excised and incubated with Agrobacterium tumefaciens containing the expression vector. After the cocultivation treatment, the explants are washed and transferred to selection media. Regenerated shoots are excised and placed on a shoot elongation medium. Shoots no longer than 1 cm are placed on rooting medium until roots develop. The rooted shoots are transplanted to soil in the greenhouse. T1 seeds are produced from plants that exhibit tolerance to the selection agent and that contain a single copy of the T-DNA insert.

### Rapeseed/Canola Transformation

[0894] Cotyledonary petioles and hypocotyls of 5-6 day old young seedling are used as explants for tissue culture and transformed according to Babic et al. (1998, Plant Cell Rep 17: 183-188). The commercial cultivar Westar (Agriculture Canada) is the standard variety used for transformation, but other varieties can also be used. Canola seeds are surface-sterilized for in vitro sowing. The cotyledon petiole explants with the cotyledon attached are excised from the in vitro seedlings, and inoculated with Agrobacterium (containing the expression vector) by dipping the cut end of the petiole explant into the bacterial suspension. The explants are then cultured for 2 days on MSBAP-3 medium containing 3 mg/l BAP, 3% sucrose, 0.7 Phytagar at 23° C., 16 hr light. After two days of co-cultivation with Agrobacterium, the petiole explants are transferred to MSBAP-3 medium containing 3 mg/l BAP, cefotaxime, carbenicillin, or timentin (300 mg/l) for 7 days, and then cultured on MSBAP-3 medium with cefotaxime, carbenicillin, or timentin and selection agent until shoot regeneration. When the shoots are 5-10 mm in length, they are cut and transferred to shoot elongation medium (MSBAP-0.5, containing 0.5 mg/l BAP). Shoots of about 2 cm in length are transferred to the rooting medium (MS0) for root induction. The rooted shoots are transplanted to soil in the greenhouse. T1 seeds are produced from plants that exhibit tolerance to the selection agent and that contain a single copy of the T-DNA insert.

### Alfalfa Transformation

[0895] A regenerating clone of alfalfa (Medicago sativa) is transformed using the method of (McKersie et al., 1999 Plant Physiol 119: 839-847). Regeneration and transformation of alfalfa is genotype dependent and therefore a regenerating plant is required. Methods to obtain regenerating plants have been described. For example, these can be selected from the cultivar Rangelander (Agriculture Canada) or any other commercial alfalfa variety as described by Brown D C W and A Atanassov (1985. Plant Cell Tissue Organ Culture 4: 111-112). Alternatively, the RA3 variety (University of Wisconsin) has been selected for use in tissue culture (Walker et al., 1978 Am J Bot 65:654-659). Petiole explants are cocultivated with an overnight culture of Agrobacterium tumefaciens C58C1 pMP90 (McKersie et al., 1999 Plant Physiol 119: 839-847) or LBA4404 containing the expression vector. The explants are cocultivated for 3 d in the dark on SH induction medium containing 288 mg/L Pro, 53 mg/L thioproline, 4.35 g/L K2SO4, and 100 μm acetosyringinone. The explants are washed in half-strength Murashige-Skoog medium (Murashige and Skoog, 1962) and plated on the same SH induction medium without acetosyringinone but with a suitable selection agent and suitable antibiotic to inhibit Agrobacterium growth. After several weeks, somatic embryos are transferred to BOi2Y development medium containing no growth regulators, no antibiotics, and 50 g/L sucrose. Somatic embryos are subsequently germinated on half-strength Murashige-Skoog medium. Rooted seedlings were transplanted into pots and grown in a greenhouse. T1 seeds are produced from plants that exhibit tolerance to the selection agent and that contain a single copy of the T-DNA insert.

### Example 21

### Phenotypic Evaluation Procedure

### 21.1 Evaluation Setup

[0896] Approximately 35 independent T0 rice transformants were generated. The primary transformants were transferred from a tissue culture chamber to a greenhouse for growing and harvest of T1 seed. Eight events, of which the T1 progeny segregated 3:1 for presence/absence of the transgene, were retained. For each of these events, approximately 10 T1 seedlings containing the transgene (hetero- and homo-zygotes) and approximately 10 T1 seedlings lacking the transgene (nullizygotes) were selected by monitoring visual marker expression. The transgenic plants and the corresponding nullizygotes were grown side-by-side at random positions. Greenhouse conditions were of shorts days (12 hours light), 28° C. in the light and 22° C. in the dark, and a relative humidity of 70%.

### Drought Screen

[0897] Plants from T2 seeds are grown in potting soil under normal conditions until they approached the heading stage. They are then transferred to a “dry” section where irrigation is withheld. Humidity probes are inserted in randomly chosen pots to monitor the soil water content (SWC). When SWC goes below certain thresholds, the plants are automatically re-watered continuously until a normal level was reached again. The plants are then re-transferred again to normal conditions. The rest of the cultivation (plant maturation, seed harvest) is the same as for plants not grown under abiotic stress conditions. Growth and yield parameters are recorded as detailed for growth under normal conditions.

### Nitrogen Use Efficiency Screen

[0898] Rice plants from T2 seeds are grown in potting soil under normal conditions except for the nutrient solution. The pots are watered from transplantation to maturation with a specific nutrient solution containing reduced N nitrogen (N) content, usually between 7 to 8 times less. The rest of the cultivation (plant maturation, seed harvest) is the same as for plants not grown under abiotic stress. Growth and yield parameters are recorded as detailed for growth under normal conditions.

[0899] Four T1 events were further evaluated in the T2 generation following the same evaluation procedure as for the T1 generation but with more individuals per event. From the stage of sowing until the stage of maturity the plants were passed several times through a digital imaging cabinet. At each time point digital images (2048×1536 pixels, 16 million colours) were taken of each plant from at least 6 different angles.

### 21.2 Statistical Analysis: F-Test

[0900] A two factor ANOVA (analysis of variants) was used as a statistical model for the overall evaluation of plant phenotypic characteristics. An F-test was carried out on all the parameters measured of all the plants of all the events transformed with the gene of the present invention. The F-test was carried out to check for an effect of the gene over all the transformation events and to verify for an overall effect of the gene, also known as a global gene effect. The threshold for significance for a true global gene effect was set at a 5% probability level for the F-test. A significant F-test value points to a gene effect, meaning that it is not only the mere presence or position of the gene that is causing the differences in phenotype.

### 21.3 Parameters Measured

### Biomass-Related Parameter Measurement

[0901] From the stage of sowing until the stage of maturity the plants were passed several times through a digital imaging cabinet. At each time point digital images (2048×1536 pixels, 16 million colours) were taken of each plant from at least 6 different angles.

[0902] The plant aboveground area (or leafy biomass) was determined by counting the total number of pixels on the digital images from aboveground plant parts discriminated from the background. This value was averaged for the pictures taken on the same time point from the different angles and was converted to a physical surface value expressed in square mm by calibration. Experiments show that the aboveground plant area measured this way correlates with the biomass of plant parts above ground. The above ground area is the time point at which the plant had reached its maximal leafy biomass. The early vigour is the plant (seedling) aboveground area three weeks post-germination.

### Seed-Related Parameter Measurements

[0903] The mature primary panicles were harvested, counted, bagged, barcode-labeled and then dried for three days in an oven at 37° C. The panicles were then threshed and all the seeds were collected and counted. The filled husks were separated from the empty ones using an air-blowing device. The empty husks were discarded and the remaining fraction was counted again. The filled husks were weighed on an analytical balance. The number of filled seeds was determined by counting the number of filled husks that remained after the separation step. The total seed yield was measured by weighing all filled husks harvested from a plant. Total seed number per plant was measured by counting the number of husks harvested from a plant. Thousand kernel weight (TKW) is extrapolated from the number of filled seeds counted and their total weight. The harvest index (HI) in the present invention is defined as the ratio between the total seed yield and the above ground area (mm²), multiplied by a factor 10⁶. The total number of flowers per panicle as defined in the present invention is the ratio between the total number of seeds and the number of mature primary panicles. The seed fill rate as defined in the present invention is the proportion (expressed as a %) of the number of filled seeds over the total number of seeds (or florets).

### Example 22

### Results of the Phenotypic Evaluation of the Transgenic Plants

[0904] The results of the evaluation of transgenic rice plants expressing the nucleic acid sequence useful in performing the methods of the invention are presented in Table G. The percentage difference between the transgenics and the corresponding nullizygotes is also shown, with a P value from the F test below 0.05.

[0905] Total seed yield, number of filled seeds, seed fill rate and harvest index are significantly increased in the transgenic plants expressing the nucleic acid sequence useful in performing the methods of the invention, compared to the control plants (in this case, the nullizygotes).

TABLE G
Results of the evaluation of transgenic rice plants expressing
the nucleic acid sequence useful in performing the methods
of the invention.

| | % Increase in | % Increase in |
|---|---|---|
| Trait | T1 generation | T2 generation |
| Total seed yield | 7 | 28 |
| Number of filled seeds | 5 | 28 |
| Fill rate | 6 | 19 |
| Harvest index | 4 | 21 |

### Example 23

### Gene Cloning

[0906] The rice SIK gene was amplified by PCR with primers (SEQ ID NO: 227; sense, start codon in bold, AttB1 site in italic: 5′-ggggacaagtttgtacaaaaaagcaggcttaaacaatgatgggttgcttcactgtc-3′) and (SEQ ID NO: 228; reverse, complementary, AttB2 site in italic: 5′-ggggaccactttgtacaagaaagctgggtatggacaatcaaaaaccctca-3′), which include the AttB sites for Gateway recombination, were used for PCR amplification. PCR was performed using Hifi Taq DNA polymerase under standard conditions. The PCR fragment was purified using standard methods. The first step of the Gateway procedure, the BP reaction, was then performed, during which the PCR fragment recombines in vivo with the pDONR201 plasmid to produce, according to the Gateway terminology, an “entry clone”. Plasmid pDONR201 was purchased from Invitrogen, as part of the Gateway® technology.

### Example 24

### Vector Construction Downregulation

[0907] The entry clone was subsequently used in an LR reaction with a destination vector used for Oryza sativa transformation for the downregulation construct. This vectors contained within the T-DNA borders: a plant selectable marker; a screenable marker expression cassette; and a Gateway cassette intended for LR in vivo recombination so as to integrate the sequence of interest from the entry clone in sense or anti sense orientation. A rice GOS2 promoter (SEQ ID NO: 226) for constitutive expression was located upstream of this Gateway cassette.

[0908] After the LR recombination step, the resulting expression vector (FIG. 16) was transformed into Agrobacterium strain LBA4044 and subsequently to Oryza sativa plants. Transformed rice plants were allowed to grow and were then examined for the parameters described in Example 26.

### Example 25

### Vector Construction Overexpression

[0909] The entry clone was subsequently used in an LR reaction with a destination vector used for plant (Oryza sativa) transformation. This vector contained within the T-DNA borders: a plant selectable marker; a screenable marker expression cassette; and a Gateway cassette intended for LR in vivo recombination with the sequence of interest already cloned in the entry clone. A rice GOS2 promoter for constitutive expression was located upstream of this Gateway cassette.

[0910] After the LR recombination step, the resulting expression vector (FIG. 17) was transformed into Agrobacterium strain LBA4044. Transformed colonies were grown on YEP media and selected by respective antibiotics for two days at 28° C. These Agrobacterium cultures were used for the plant transformation. Transformed rice plants were allowed to grow and were then examined for the parameters described in Example 26.

### Example 26

### Evaluation of Plants Transformed with SIK in Anti Sense Orientation

[0911] Approximately 15 to 20 independent T0 rice transformants were generated. The primary transformants were transferred from a tissue culture chamber to a greenhouse for growing and harvest of T1 seed. Six events for which the T1 progeny segregated 3:1 for presence/absence of the transgene, were retained. For each of these events, approximately 10 T1 seedlings containing the transgene (hetero- and homozygotes) and approximately 10 T1 seedlings lacking the transgene (nullizygotes) were selected by monitoring visual marker expression. The selected T1 plants were transferred to a greenhouse. Each plant received a unique barcode label to link unambiguously the phenotyping data to the corresponding plant. The selected T1 plants were grown on soil in 10 cm diameter pots under the following environmental settings: photoperiod=11.5 h, daylight intensity=30,000 lux or more, daytime temperature=28° C., night time temperature=22° C., relative humidity=60-70%. Plants were grown under optimal watering conditions until they approached the heading stage when irrigation was withheld. Humidity probes were inserted in randomly chosen pots to monitor the soil water content (SWC). When SWC dropped below 20%, the plants were automatically re-watered to achieve optimal watering conditions again. Transgenic plants and the corresponding nullizygotes were grown side-by-side at random positions. From the stage of sowing until the stage of maturity the plants were passed several times through a digital imaging cabinet. At each time point digital images (2048×1536 pixels, 16 million colours) were taken of each plant from at least 6 different angles.

### Drought Screen

[0912] Plants from T2 seeds are grown in potting soil under normal conditions until they approached the heading stage. They are then transferred to a “dry” section where irrigation is withheld. Humidity probes are inserted in randomly chosen pots to monitor the soil water content (SWC). When SWC goes below certain thresholds, the plants are automatically re-watered continuously until a normal level was reached again. The plants are then re-transferred again to normal conditions. The rest of the cultivation (plant maturation, seed harvest) is the same as for plants not grown under abiotic stress conditions. Growth and yield parameters are recorded as detailed for growth under normal conditions.

### Nitrogen Use Efficiency Screen

[0913] Rice plants from T2 seeds are grown in potting soil under normal conditions except for the nutrient solution. The pots are watered from transplantation to maturation with a specific nutrient solution containing reduced N nitrogen (N) content, usually between 7 to 8 times less. The rest of the cultivation (plant maturation, seed harvest) is the same as for plants not grown under abiotic stress. Growth and yield parameters are recorded as detailed for growth under normal conditions.

[0914] The plant aboveground area (or leafy biomass) was determined by counting the total number of pixels on the digital images from aboveground plant parts discriminated from the background. This value was averaged for the pictures taken on the same time point from the different angles and was converted to a physical surface value expressed in square mm by calibration. Experiments show that the aboveground plant area measured this way correlates with the biomass of plant parts aboveground. The Areamax is the aboveground area at the time point at which the plant had reached its maximal leafy biomass.

[0915] The mature primary panicles were harvested, bagged, barcode-labelled and then dried for three days in the oven at 37° C. The panicles were then threshed and all the seeds collected. The filled husks were separated from the empty ones using an air-blowing device. After separation, both seed lots were then counted using a commercially available counting machine. The empty husks were discarded. The filled husks were weighed on an analytical balance and the cross-sectional area of the seeds was measured using digital imaging. This procedure resulted in the set of the following seed-related parameters:

[0916] The flowers-per-panicle is a parameter estimating the average number of florets per panicle on a plant, derived from the number of total seeds divided by the number of first panicles. The tallest panicle and all the panicles that overlapped with the tallest panicle when aligned vertically, were considered as first panicles and were counted manually. The number of filled seeds was determined by counting the number of filled husks that remained after the separation step. The total seed yield (total seed weight) was measured by weighing all filled husks harvested from a plant. Total seed number per plant was measured by counting the number of husks harvested from a plant and corresponds to the number of florets per plant. These parameters were derived in an automated way from the digital images using image analysis software and were analysed statistically. Individual seed parameters (including width, length, area, weight) were measured using a custom-made device consisting of two main components, a weighing and imaging device, coupled to software for image analysis. The harvest index in the present invention is defined as the ratio between the total seed yield (g) and the above ground area (mm²), multiplied by a factor 106.

[0917] A two factor ANOVA (analyses of variance) corrected for the unbalanced design was used as statistical model for the overall evaluation of plant phenotypic characteristics. An F-test was carried out on all the parameters measured of all the plants of all the events transformed with that gene. The F-test was carried out to check for an effect of the gene over all the transformation events and to verify for an overall effect of the gene, also named herein “global gene effect”. If the value of the F test shows that the data are significant, than it is concluded that there is a “gene” effect, meaning that not only presence or the position of the gene is causing the effect. The threshold for significance for a true global gene effect is set at 5% probability level for the F test.

[0918] To check for an effect of the genes within an event, i.e., for a line-specific effect, a t-test was performed within each event using data sets from the transgenic plants and the corresponding null plants. “Null plants” or “null segregants” or “nullizygotes” are the plants treated in the same way as the transgenic plant, but from which the transgene has segregated. Null plants can also be described as the homozygous negative transformed plants. The threshold for significance for the t-test is set at 10% probability level. The results for some events can be above or below this threshold. This is based on the hypothesis that a gene might only have an effect in certain positions in the genome, and that the occurrence of this position-dependent effect is not uncommon. This kind of gene effect is also named herein a “line effect of the gene”. The p-value was obtained by comparing the t-value to the t-distribution or alternatively, by comparing the F-value to the F-distribution. The p-value then gives the probability that the null hypothesis (i.e., that there is no effect of the transgene) is correct.

### Example 27

### Results

### 1. Thousand Kernel Weight

[0919] The transgenic lines transformed with the downregulation construct gave an overall percentage increase of 3% compared to controls with the best line giving a 10% increase compared to controls.

### 2. Harvest Index

[0920] The transgenic lines transformed with the downregulation construct gave an overall percentage increase of 16% compared to controls with the best line giving a 61% increase compared to controls.

### 3. Fill Rate

[0921] The transgenic lines transformed with the downregulation construct gave an overall percentage increase of 14% compared to controls with the best line giving a 41% increase compared to controls.

### 4. Flowers Per Panicle (Number of Flowers Per Plant)

[0922] The transgenic lines transformed with the downregulation construct gave an overall percentage decrease of −3% compared to controls with the best line giving a −11% decrease compared to controls. A decrease in the number of flowers may be important for grasses (when used for lawns for example).

[0923] The transgenic lines transformed with the overexpression construct gave an overall percentage increase of 6% compared to controls with the best line giving a 14% increase compared to controls.

### Example 28

### Identification of Sequences Related to SEQ ID NO: 229 and SEQ ID NO: 230

[0924] Sequences (full length cDNA, ESTs or genomic) related to SEQ ID NO: 229 and SEQ ID NO: 230 were identified amongst those maintained in the Entrez Nucleotides database at the National Center for Biotechnology Information (NCBI) using database sequence search tools, such as the Basic Local Alignment Tool (BLAST) (Altschul et al. (1990) J. Mol. Biol. 215:403-410; and Altschul et al. (1997) Nucleic Acids Res. 25:3389-3402). This program was used to find regions of local similarity between sequences by comparing nucleic acid or polypeptide sequences to sequence databases and by calculating the statistical significance of matches. The polypeptide encoded by SEQ ID NO: 229 was used for the TBLASTN algorithm, with default settings and with the filter to ignore low complexity sequences set off. The output of the analysis was viewed by pairwise comparison, and ranked according to the probability score (E-value), where the score reflects the probability that a particular alignment occurs by chance (the lower the E-value, the more significant the hit). In addition to E-values, comparisons were also scored by percentage identity. Percentage identity refers to the number of identical nucleotides (or amino acids) between the two compared nucleic acid (or polypeptide) sequences over a particular length.

[0925] Table H provides a list of nucleic acid sequences related to the nucleic acid sequence as represented by SEQ ID NO: 229.

TABLE H
Nucleic acid and polypeptide sequences related to the nucleic acid sequence of
SEQ ID NO: 229 and SEQ ID NO: 230 which are useful in performing the methods of the
present invention.

| | | Nucleic acid | Poly-peptide | Database accession | |
|---|---|---|---|---|---|
| Name | Source organism | SEQ ID NO: | SEQ ID NO: | number | Status |
| HAT4 | Arabidopsis thaliana | 229 | 230 | AT4G16780 | Full length |
| LD | Arabidopsis thaliana | 231 | 232 | NP_192165.1 | Full length |
| | Oryza sativa | 233 | 234 | Os03g47022 | Full length |
| | Oryza sativa | 235 | 236 | Os03g12860 | Full length |
| HAT22 | Oryza sativa | 237 | 238 | Os10g01470 | Full length |
| HAT14 | Oryza sativa | 239 | 240 | Os08g36220 | Full length |
| | Oryza sativa | 241 | 242 | Os09g27450 | Full length |
| HAT3 | Oryza sativa | 243 | 244 | Os06g04850 | Full length |
| S1HDL2 | Oryza sativa | 245 | 246 | Os06g04870 | Full length |
| HD-ZIP | Oryza sativa | 247 | 248 | Os10g41230 | Full length |
| | Arabidopsis thaliana | 249 | 250 | NP_174025.3 | Full length |
| HAT14 | Arabidopsis thaliana | 251 | 252 | NP_974743.1 | Full length |
| HAT4 | Arabidopsis thaliana | 253 | 254 | NP_193411.1 | Full length |
| HAT1 | Arabidopsis thaliana | 255 | 256 | NP_193476.1 | Full length |
| HAT2 | Arabidopsis thaliana | 257 | 258 | NP_199548.1 | Full length |
| HB-4 | Arabidopsis thaliana | 259 | 260 | NP_182018.1 | Full length |
| HAT3 | Arabidopsis thaliana | 261 | 262 | NP_191598.1 | Full length |
| | Oryza sativa | 263 | 264 | Os04g46350 | Full length |
| | Oryza sativa | 265 | 266 | Os10g23090 | Full length |
| | Oryza sativa | 267 | 268 | Os10g23090 | Full length |
| | Oryza sativa | 269 | 270 | Os03g08960 | Full length |
| | Oryza sativa | 271 | 272 | Os08g37580 | Full length |
| | Oryza sativa | 273 | 274 | Os09g29460 | Full length |
| | Oryza sativa | 275 | 276 | Os10g39720 | Full length |
| | Oryza sativa | 277 | 278 | Os05g09630 | Full length |

### Example 29

### Alignment of Relevant Polypeptide Sequences

[0926] AlignX from the Vector NTI (Invitrogen) is based on the popular Clustal algorithm of progressive alignment (Thompson et al. (1997) Nucleic Acids Res 25:4876-4882; Chenna et al. (2003). Nucleic Acids Res 31:3497-3500). A phylogenetic tree was constructed using a neighbour-joining clustering algorithm (see FIG. 18). Default values are for the gap open penalty of 10, for the gap extension penalty of 0.1 and the selected weight matrix is Blosum 62 (if polypeptides are aligned). The result of the multiple sequence alignment using is shown in FIG. 19.

### Example 30

### Identification of Domains Comprised in Polypeptide Sequences Useful in Performing the Methods of the Invention

[0927] The Integrated Resource of Protein Families, Domains and Sites (InterPro) database is an integrated interface for the commonly used signature databases for text- and sequence-based searches. The InterPro database combines these databases, which use different methodologies and varying degrees of biological information about well-characterized proteins to derive protein signatures. Collaborating databases include SWISS-PROT, PROSITE, TrEMBL, PRINTS, ProDom and Pfam, Smart and TIGRFAMs. Interpro is hosted at the European Bioinformatics Institute in the United Kingdom.

[0928] The results of the InterPro scan of the polypeptide sequence as represented by SEQ ID NO: 230 are presented in Table I.

TABLE I
InterPro scan results of the polypeptide sequence as represented by
SEQ ID NO: 230

| Database | Accession number | Accession name |
|---|---|---|
| InterPro | IPR006712 | HDZIP |
| InterPro | IPR001356 | homeobox |
| InterPro | IPR003106 | HALZ |
| ProDom | PDA0K5J1 | homeobox PPHB4 DNA binding |
| ProDom | PD728753 | DNA binding |
| ProDom | PD064887 | DNA binding |
| PIR superfamily | PIR PS00001 | asn glycosylation motif |
| PIR superfamily | PS00004 | cAMP phosphorylation site |
| PIR superfamily | PS00005 | PKC phosphorylation site |
| PIR superfamily | PS00006 | CK2 phsophorylation site |
| PIR superfamily | PS00008 | myristoylation |
| PIR superfamily | PS00009 | amidation |
| PIR superfamily | PS00027 | homeobox |
| PIR superfamily | PS00029 | leucine zipper |
| Pfam | PF04618 | HDZIP |
| Pfam | PF00046 | homeobox |
| Pfam | PF02183 | HALZ |

### Example 31

### Cloning of Nucleic Acid Sequence Represented by SEQ ID NO: 229

[0929] The Arabidopsis thaliana HAT4-encoding gene was amplified by PCR using as a template an Arabidopsis thaliana cDNA library (Invitrogen, Paisley, UK). After reverse transcription of RNA extracted from seedlings, the cDNAs were cloned into pCMV Sport 6.0. Average insert size of the bank was 1.6 kb and the original number of clones was of the order of 1.67×107 cfu. Original titer was determined to be 3.34×106 cfu/ml after first amplification of 6×1010 cfu/ml. After plasmid extraction, 200 ng of template was used in a 50 μl PCR mix. The primers used were:

Forward
(SEQ ID NO: 283)
ggggacaagtttgtacaaaaaagcaggcttcacaatgatgttcgag
aaagacgatctg
Reverse
(SEQ ID NO: 284)
ggggaccactttgtacaagaaagctgggtttaggacctaggacgaa
gagcgt

which include the AttB sites for Gateway recombination. The amplified PCR fragment was purified also using standard methods. The first step of the Gateway procedure, the BP reaction, was then performed, during which the PCR fragment recombined in vivo with the pDONR201 plasmid to produce, according to the Gateway terminology, an “entry clone”. Plasmid pDONR201 was purchased from Invitrogen, as part of the Gateway® technology.

### Example 32

### Expression Vector Construction Using the Nucleic Acid Sequence as Represented by SEQ ID NO: 229

[0930] The entry clone was subsequently used in an LR reaction with a destination vector used for Oryza sativa transformation. This vector contains as functional elements within the T-DNA borders: a plant selectable marker; a screenable marker expression cassette; and a Gateway cassette intended for LR in vivo recombination with the nucleic acid sequence of interest already cloned in the entry clone. A rice GOS2 promoter (SEQ ID NO: 282) for constitutive expression was located upstream of this Gateway cassette.

[0931] After the LR recombination step, the resulting expression vector (FIG. 21) was transformed into Agrobacterium strain LBA4044 according to methods well known in the art.

### Example 33

### Plant Transformation

### Rice Transformation

[0932] The Agrobacterium containing the expression vector was used to transform Oryza sativa plants. Mature dry seeds of the rice japonica cultivar Nipponbare were dehusked. Sterilization was carried out by incubating for one minute in 70% ethanol, followed by 30 minutes in 0.2% HgCl2, followed by a 6 times 15 minutes wash with sterile distilled water. The sterile seeds were then germinated on a medium containing 2,4-D (callus induction medium). After incubation in the dark for four weeks, embryogenic, scutellum-derived calli were excised and propagated on the same medium. After two weeks, the calli were multiplied or propagated by subculture on the same medium for another 2 weeks. Embryogenic callus pieces were sub-cultured on fresh medium 3 days before co-cultivation (to boost cell division activity).

[0933] Agrobacterium strain LBA4404 containing the expression vector was used for cocultivation. Agrobacterium was inoculated on AB medium with the appropriate antibiotics and cultured for 3 days at 28° C. The bacteria were then collected and suspended in liquid co-cultivation medium to a density (OD600) of about 1. The suspension was then transferred to a Petri dish and the calli immersed in the suspension for 15 minutes. The callus tissues were then blotted dry on a filter paper and transferred to solidified, co-cultivation medium and incubated for 3 days in the dark at 25° C. Co-cultivated calli were grown on 2,4-D-containing medium for 4 weeks in the dark at 28° C. in the presence of a selection agent. During this period, rapidly growing resistant callus islands developed. After transfer of this material to a regeneration medium and incubation in the light, the embryogenic potential was released and shoots developed in the next four to five weeks. Shoots were excised from the calli and incubated for 2 to 3 weeks on an auxin-containing medium from which they were transferred to soil. Hardened shoots were grown under high humidity and short days in a greenhouse.

[0934] Approximately 35 independent T0 rice transformants were generated for one construct. The primary transformants were transferred from a tissue culture chamber to a greenhouse. After a quantitative PCR analysis to verify copy number of the T-DNA insert, only single copy transgenic plants that exhibit tolerance to the selection agent were kept for harvest of T1 seed. Seeds were then harvested three to five months after transplanting. The method yielded single locus transformants at a rate of over 50% (Aldemita and Hodges 1996, Chan et al. 1993, Hiei et al. 1994).

### Example 34

### Phenotypic Evaluation Procedure

### 34.1 Evaluation Setup

[0935] Approximately 35 independent T0 rice transformants were generated. The primary transformants were transferred from a tissue culture chamber to a greenhouse for growing and harvest of T1 seed. Eight events, of which the T1 progeny segregated 3:1 for presence/absence of the transgene, were retained. For each of these events, approximately 10 T1 seedlings containing the transgene (hetero- and homo-zygotes) and approximately 10 T1 seedlings lacking the transgene (nullizygotes) were selected by monitoring visual marker expression. The transgenic plants and the corresponding nullizygotes were grown side-by-side at random positions. Greenhouse conditions were of shorts days (12 hours light), 28° C. in the light and 22° C. in the dark, and a relative humidity of 70%.

[0936] Four T1 events were further evaluated in the T2 generation following the same evaluation procedure as for the T1 generation but with more individuals per event.

### Drought Screen

[0937] Plants from T2 seeds are grown in potting soil under normal conditions until they approached the heading stage. They are then transferred to a “dry” section where irrigation is withheld. Humidity probes are inserted in randomly chosen pots to monitor the soil water content (SWC). When SWC goes below certain thresholds, the plants are automatically re-watered continuously until a normal level was reached again. The plants are then re-transferred again to normal conditions. The rest of the cultivation (plant maturation, seed harvest) is the same as for plants not grown under abiotic stress conditions. Growth and yield parameters are recorded as detailed for growth under normal conditions.

### Nitrogen Use Efficiency Screen

[0938] Rice plants from T2 seeds are grown in potting soil under normal conditions except for the nutrient solution. The pots are watered from transplantation to maturation with a specific nutrient solution containing reduced N nitrogen (N) content, usually between 7 to 8 times less. The rest of the cultivation (plant maturation, seed harvest) is the same as for plants not grown under abiotic stress. Growth and yield parameters are recorded as detailed for growth under normal conditions.

[0939] Non-destructive oil measurements from rice seeds was measured using the Oxford QP20+ pulsed NMR. Whole seeds were used without dehusking.

### 34.2 Statistical Analysis: F-Test

[0940] A two factor ANOVA (analysis of variants) was used as a statistical model for the overall evaluation of plant phenotypic characteristics. An F-test was carried out on all the parameters measured of all the plants of all the events transformed with the gene of the present invention. The F-test was carried out to check for an effect of the gene over all the transformation events and to verify an overall effect of the gene, also known as a global gene effect. The threshold for significance for a true global gene effect was set at a 5% probability level for the F-test. A significant F-test value points to a gene effect, meaning that it is not only the mere presence or position of the gene that is causing the differences in phenotype.

### 34.3 Results

[0941] The best line showed an 11% increase in oil content compared to control plants, with an average increase in oil content of 6% over all lines and a p value from the F-test of <0.0001

### Example 35

### Transformation of Corn

[0942] Transformation of maize (Zea mays) is performed with a modification of the method described by Ishida et al. (1996) Nature Biotech 14(6): 745-50. Transformation is genotype-dependent in corn and only specific genotypes are amenable to transformation and regeneration. The inbred line A188 (University of Minnesota) or hybrids with A188 as a parent are good sources of donor material for transformation, but other genotypes can be used successfully as well. Ears are harvested from corn plant approximately 11 days after pollination (DAP) when the length of the immature embryo is about 1 to 1.2 mm. Immature embryos are cocultivated with Agrobacterium tumefaciens containing the expression vector, and transgenic plants are recovered through organogenesis. Excised embryos are grown on callus induction medium, then maize regeneration medium, containing the selection agent (for example imidazolinone but various selection markers can be used). The Petri plates are incubated in the light at 25° C. for 2-3 weeks, or until shoots develop. The green shoots are transferred from each embryo to maize rooting medium and incubated at 25° C. for 2-3 weeks, until roots develop. The rooted shoots are transplanted to soil in the greenhouse. T1 seeds are produced from plants that exhibit tolerance to the selection agent and that contain a single copy of the T-DNA insert.

### Example 36

### Transformation of Wheat

[0943] Transformation of wheat is performed with the method described by Ishida et al. (1996) Nature Biotech 14(6): 745-50. The cultivar Bobwhite (available from CIMMYT, Mexico) is commonly used in transformation. Immature embryos are co-cultivated with Agrobacterium tumefaciens containing the expression vector, and transgenic plants are recovered through organogenesis. After incubation with Agrobacterium, the embryos are grown in vitro on callus induction medium, then regeneration medium, containing the selection agent (for example imidazolinone but various selection markers can be used). The Petri plates are incubated in the light at 25° C. for 2-3 weeks, or until shoots develop. The green shoots are transferred from each embryo to rooting medium and incubated at 25° C. for 2-3 weeks, until roots develop. The rooted shoots are transplanted to soil in the greenhouse. T1 seeds are produced from plants that exhibit tolerance to the selection agent and that contain a single copy of the T-DNA insert.

### Example 37

### Transformation of Soybean

[0944] Soybean is transformed according to a modification of the method described in the Texas A&M patent U.S. Pat. No. 5,164,310. Several commercial soybean varieties are amenable to transformation by this method. The cultivar Jack (available from the Illinois Seed foundation) is commonly used for transformation. Soybean seeds are sterilised for in vitro sowing. The hypocotyl, the radicle and one cotyledon are excised from seven-day old young seedlings. The epicotyl and the remaining cotyledon are further grown to develop axillary nodes. These axillary nodes are excised and incubated with Agrobacterium tumefaciens containing the expression vector. After the cocultivation treatment, the explants are washed and transferred to selection media. Regenerated shoots are excised and placed on a shoot elongation medium. Shoots no longer than 1 cm are placed on rooting medium until roots develop. The rooted shoots are transplanted to soil in the greenhouse. T1 seeds are produced from plants that exhibit tolerance to the selection agent and that contain a single copy of the T-DNA insert.

### Example 38

### Transformation of Rapeseed/Canola

[0945] Cotyledonary petioles and hypocotyls of 5-6 day old young seedling are used as explants for tissue culture and transformed according to Babic et al. (1998, Plant Cell Rep 17: 183-188). The commercial cultivar Westar (Agriculture Canada) is the standard variety used for transformation, but other varieties can also be used. Canola seeds are surface-sterilized for in vitro sowing. The cotyledon petiole explants with the cotyledon attached are excised from the in vitro seedlings, and inoculated with Agrobacterium (containing the expression vector) by dipping the cut end of the petiole explant into the bacterial suspension. The explants are then cultured for 2 days on MSBAP-3 medium containing 3 mg/l BAP, 3% sucrose, 0.7 Phytagar at 23° C., 16 hr light. After two days of co-cultivation with Agrobacterium, the petiole explants are transferred to MSBAP-3 medium containing 3 mg/l BAP, cefotaxime, carbenicillin, or timentin (300 mg/l) for 7 days, and then cultured on MSBAP-3 medium with cefotaxime, carbenicillin, or timentin and selection agent until shoot regeneration. When the shoots are 5-10 mm in length, they are cut and transferred to shoot elongation medium (MSBAP-0.5, containing 0.5 mg/l BAP). Shoots of about 2 cm in length are transferred to the rooting medium (MS0) for root induction. The rooted shoots are transplanted to soil in the greenhouse. T1 seeds are produced from plants that exhibit tolerance to the selection agent and that contain a single copy of the T-DNA insert.

### Example 39

### Transformation of Alfalfa

[0946] A regenerating clone of alfalfa (Medicago sativa) is transformed using the method of (McKersie et al., 1999 Plant Physiol 119: 839-847). Regeneration and transformation of alfalfa is genotype dependent and therefore a regenerating plant is required. Methods to obtain regenerating plants have been described. For example, these can be selected from the cultivar Rangelander (Agriculture Canada) or any other commercial alfalfa variety as described by Brown D C W and A Atanassov (1985. Plant Cell Tissue Organ Culture 4: 111-112). Alternatively, the RA3 variety (University of Wisconsin) has been selected for use in tissue culture (Walker et al., 1978 Am J Bot 65:654-659). Petiole explants are cocultivated with an overnight culture of Agrobacterium tumefaciens C58C1 pMP90 (McKersie et al., 1999 Plant Physiol 119: 839-847) or LBA4404 containing the expression vector. The explants are cocultivated for 3 d in the dark on SH induction medium containing 288 mg/L Pro, 53 mg/L thioproline, 4.35 g/L K2SO4, and 100 μm acetosyringinone. The explants are washed in half-strength Murashige-Skoog medium (Murashige and Skoog, 1962) and plated on the same SH induction medium without acetosyringinone but with a suitable selection agent and suitable antibiotic to inhibit Agrobacterium growth. After several weeks, somatic embryos are transferred to BOi2Y development medium containing no growth regulators, no antibiotics, and 50 g/L sucrose. Somatic embryos are subsequently germinated on half-strength Murashige-Skoog medium. Rooted seedlings were transplanted into pots and grown in a greenhouse. T1 seeds are produced from plants that exhibit tolerance to the selection agent and that contain a single copy of the T-DNA insert.

### Example 40

### Identification of Sequences Related to SEQ ID NO: 285 and SEQ ID NO: 286

[0947] Sequences (full length cDNA, ESTs or genomic) related to SEQ ID NO: 285 and/or protein sequences related to SEQ ID NO: 286 were identified amongst those maintained in the Entrez Nucleotides database at the National Center for Biotechnology Information (NCBI) using database sequence search tools, such as the Basic Local Alignment Tool (BLAST) (Altschul et al. (1990) J. Mol. Biol. 215:403-410; and Altschul et al. (1997) Nucleic Acids Res. 25:3389-3402). The program is used to find regions of local similarity between sequences by comparing nucleic acid or polypeptide sequences to sequence databases and by calculating the statistical significance of matches. The polypeptide encoded by SEQ ID NO: 285 was used for the TBLASTN algorithm, with default settings and the filter to ignore low complexity sequences set off. The output of the analysis was viewed by pairwise comparison, and ranked according to the probability score (E-value), where the score reflects the probability that a particular alignment occurs by chance (the lower the E-value, the more significant the hit). In addition to E-values, comparisons were also scored by percentage identity. Percentage identity refers to the number of identical nucleotides (or amino acids) between the two compared nucleic acid (or polypeptide) sequences over a particular length. In some instances, the default parameters may be adjusted to modify the stringency of the search.

[0948] In addition to the publicly available nucleic acid sequences available at NCBI, proprietary sequence databases are also searched following the same procedure as described herein above.

[0949] Table J provides a list of nucleic acid and protein sequences related to the nucleic acid sequence as represented by SEQ ID NO: 285 and the protein sequence represented by SEQ ID NO: 286.

TABLE J
Nucleic acid sequences related to the nucleic acid sequence (SEQ ID NO: 1) useful
in the methods of the present invention, and the corresponding deduced polypeptides.

| | | | | Database | |
|---|---|---|---|---|---|
| | Source | Nucleic acid | Polypeptide | accession | |
| Name | organism | SEQ ID NO: | SEQ ID NO: | number | Status |
| SYB1 | Arabidopsis | 285 | 286 | NM112438 | Full length |
| | thaliana | | | | |
| zinc finger | Gossypium | 287 | 288 | AAZ94630 | Full length |
| protein-like | hirsutum | | | | |
| protein | | | | | |
| putative zinc | Zea mays | 289 | 290 | Q53AV6 | Full length |
| finger protein ZF2 | | | | | |
| Zinc finger | Oryza sativa | 291 | 292 | Q6Z6E6 | Full length |
| transcription | | | | | |
| factor ZFP30 | | | | | |
| Hypothetical | Arabidopsis | 293 | 294 | Q8GWD1 | Full length |
| protein | thaliana | | | | |
| At5g25490 | | | | | |
| Putative zinc | Oryza sativa | 295 | 296 | Q9SW92 | Full length |
| finger protein | | | | | |
| Putative zinc | Oryza sativa | 297 | 298 | Q8RYZ5 | Full length |
| finger | | | | | |
| transcription | | | | | |
| factor | | | | | |
| GlimmerM protein | Beta vulgaris | 299 | 300 | ABD83289 | Full length |
| 152 | | | | | |
| Predicted protein | Arabidopsis | 301 | 302 | Q8S8K1 | Full length |
| At2g17975 | thaliana | | | | |
| Hypothetical | Arabidopsis | 303 | 304 | Q8GZ43 | Full length |
| RanBP2-type | thaliana | | | | |
| zinc-finger protein | | | | | |
| At1g67325 | | | | | |
| P53 binding | Oryza sativa | 305 | 306 | Q7F1K4 | Full length |
| protein-like | | | | | |
| Putative p53 | Oryza sativa | 307 | 308 | Q7XHQ8 | Full length |
| binding protein | | | | | |
| Hypothetical | Brassica | 309 | 310 | CX272690 | Full length |
| protein | rapa | | | | |
| Hypothetical | Euphorbia | 311 | 312 | DV143669 | Full length |
| protein | esula | | | | |
| Hypothetical | Gossypium | 313 | 314 | DR459119 | Full length |
| protein | hirsutum | | | | |
| Hypothetical | Vitis vinifera | 315 | 316 | DV221228 | Full length |
| protein | | | | | |
| Hypothetical | Populus | 317 | 318 | DT496999 | Full length |
| protein | trichocarpa | | | | |
| Hypothetical | Gossypium | 319 | 320 | DT457997 | Full length |
| protein | hirsutum | | | | |
| Hypothetical | Lactuca | 321 | 322 | DW105125 | Full length |
| protein | serriola | | | | |
| Hypothetical | Glycine max | 323 | 324 | BG238374 | Full length |
| protein | | | | | |
| Hypothetical | Populus | 325 | 226 | DT494117 | Full length |
| protein | trichocarpa | | | | |
| Hypothetical | Populus sp. | 327 | 328 | DV465465 | Full length |
| protein | | | | | |
| zinc finger | Oryza sativa | 329 | 330 | AY219846 | Full length |
| transcription | | | | | |
| factor | | | | | |
| Hypothetical | Panicum | 331 | 332 | DN152082 | Full length |
| protein | virgatum | | | | |
| Zinc finger, | Medicago | 333 | 334 | Q1RWK5 | Full length |
| RanBP2-type | truncatula | | | | |
| Zinc finger, | Medicago | 335 | 336 | Q1S406 | Full length |
| RanBP2-type | truncatula | | | | |
| Hypothetical | Yucca | 337 | 338 | DT581158 | Full length |
| protein | filamentosa | | | | |
| Hypothetical | Hordeum | 339 | 340 | BQ471337 | Full length |
| protein | vulgare | | | | |

### Example 41

### Alignment of Relevant Polypeptide Sequences

[0950] AlignX from the Vector NTI (Invitrogen) is based on the popular Clustal algorithm of progressive alignment (Thompson et al. (1997) Nucleic Acids Res 25:4876-4882; Chenna et al. (2003). Nucleic Acids Res 31:3497-3500). A phylogenetic tree can be constructed using a neighbour-joining clustering algorithm. Default values are for the gap open penalty of 10, for the gap extension penalty of 0.1 and the selected weight matrix is Blosum 62 (if polypeptides are aligned).

[0951] The result of a multiple sequence alignment using polypeptides relevant in identifying the ones useful in performing the methods of the invention is shown in FIG. 23A of the present application. The three Zinc-finger domains can be easily identified.

### Example 42

### Calculation of Global Percentage Identity Between Polypeptide Sequences Useful in Performing the Methods of the Invention

[0952] Global percentages of similarity and identity between full length polypeptide sequences useful in performing the methods of the invention were determined using one of the methods available in the art, the MatGAT (Matrix Global Alignment Tool) software (BMC Bioinformatics. 2003 4:29. MatGAT: an application that generates similarity/identity matrices using protein or DNA sequences. Campanella J J, Bitincka L, Smalley J; software hosted by Ledion Bitincka). MatGAT software generates similarity/identity matrices for DNA or protein sequences without needing pre-alignment of the data. The program performs a series of pair-wise alignments using the Myers and Miller global alignment algorithm (with a gap opening penalty of 12, and a gap extension penalty of 2), calculates similarity and identity using for example Blosum 62 (for polypeptides), and then places the results in a distance matrix. Sequence similarity is shown in the bottom half of the dividing line and sequence identity is shown in the top half of the diagonal dividing line.

[0953] Parameters used in the comparison were:
[0954] Scoring matrix: Blosum62
[0955] First Gap: 12
[0956] Extending gap: 2

[0957] Results of the software analysis are shown in Table K for the global similarity and identity over the full length of the polypeptide sequences (excluding the partial polypeptide sequences). Percentage identity is given above the diagonal and percentage similarity is given below the diagonal.

[0958] The percentage identity between the polypeptide sequences useful in performing the methods of the invention can be as low as 16.9% amino acid identity compared to SEQ ID NO: 286.

TABLE K
MatGAT results for global similarity and identity over the full length of the polypeptide sequences.

| | 1 | 2 | 3 | 4 | 5 | 6 | 7 | 8 | 9 | 10 | 11 | 12 | 13 | 14 |
|---|---|---|---|---|---|---|---|---|---|---|---|---|---|---|
| 1. SEQID286 | | 69.5 | 56.1 | 61.4 | 58.7 | 50.6 | 37.9 | 63.2 | 24.2 | 20.9 | 16.9 | 20.7 | 59.1 | 74.7 |
| 2. SEQID288 | 75.6 | | 57.5 | 60.2 | 58.2 | 54.7 | 43 | 59.2 | 20.1 | 17.1 | 15.7 | 18.3 | 50 | 73.1 |
| 3. SEQID290 | 67 | 67 | | 84.3 | 57.5 | 49.4 | 38.9 | 66.8 | 26.3 | 20.4 | 17.3 | 21.5 | 39.7 | 59.9 |
| 4. SEQID292 | 71.1 | 69.9 | 89.8 | | 58.2 | 55.4 | 42.9 | 62.5 | 23.7 | 20.3 | 17 | 22.5 | 46.2 | 64.5 |
| 5. SEQID294 | 68.2 | 66.5 | 68.8 | 67.1 | | 48.6 | 39.1 | 59.9 | 22.3 | 19.8 | 17.2 | 20.4 | 43 | 59.6 |
| 6. SEQID296 | 63.4 | 69 | 60.8 | 64.5 | 56.5 | | 45.8 | 48.6 | 23.6 | 19.1 | 16.7 | 18.3 | 38 | 54 |
| 7. SEQID298 | 56.1 | 66.9 | 54 | 58.4 | 55.9 | 61.4 | | 37 | 20.5 | 17 | 14.5 | 18.9 | 29.9 | 39.2 |
| 8. SEQID300 | 68 | 64.5 | 75 | 73.3 | 71.5 | 58.7 | 54.7 | | 24.5 | 21.3 | 19.8 | 22.6 | 47.1 | 61.8 |
| 9. SEQID302 | 32.5 | 29.1 | 36.9 | 34 | 32.5 | 32.1 | 31.3 | 32.5 | | 22.3 | 17.9 | 21.4 | 16.6 | 21.6 |
| 10. SEQID304 | 27.1 | 22.6 | 29.9 | 29.9 | 27.4 | 27.4 | 20.8 | 28.1 | 39.9 | | 47 | 36.1 | 17.2 | 18.8 |
| 11. SEQID306 | 23.9 | 21.3 | 25.4 | 24.2 | 24.5 | 22.2 | 19.9 | 28 | 33.7 | 57.9 | | 31.2 | 15.1 | 18.1 |
| 12. SEQID308 | 28.5 | 24.9 | 28.2 | 29.2 | 29.6 | 24.9 | 24.2 | 29.2 | 35.7 | 49.7 | 40.3 | | 16.8 | 20.4 |
| 13. SEQID310 | 63.4 | 57.6 | 48.3 | 53.6 | 50.6 | 48.3 | 50.4 | 52.3 | 23.1 | 21.9 | 19 | 21.7 | | 51.6 |
| 14. SEQID312 | 84.1 | 82.1 | 71.6 | 75.3 | 70 | 67.3 | 61.5 | 68 | 32.5 | 25.3 | 23.3 | 29.6 | 56.4 | |
| 15. SEQID314 | 78.7 | 85.1 | 69.3 | 73.5 | 67.1 | 68.2 | 62.2 | 69.2 | 30.2 | 25 | 22.5 | 26.4 | 58.8 | 84.6 |
| 16. SEQID316 | 79.9 | 84.7 | 74.4 | 79.5 | 73.5 | 66 | 64.7 | 75 | 31.7 | 26.4 | 23.3 | 28.9 | 58 | 86.5 |
| 17. SEQID318 | 77.4 | 85.4 | 70.5 | 76.5 | 70 | 68.2 | 60.9 | 70.3 | 31.3 | 26 | 22.2 | 28.5 | 58.9 | 86.5 |
| 18. SEQID320 | 78.7 | 78.7 | 73.3 | 79.5 | 73.5 | 66.5 | 63.9 | 74.4 | 31.3 | 26.7 | 52.1 | 31.4 | 56.8 | 84.6 |
| 19. SEQID322 | 75.7 | 71 | 73.3 | 75.1 | 74.7 | 63.3 | 56.2 | 74.4 | 29.9 | 27.4 | 23.6 | 28.2 | 53.3 | 76.9 |
| 20. SEQID324 | 74.4 | 83.6 | 68.8 | 74.7 | 67.1 | 69.9 | 62.3 | 69.8 | 30.2 | 25 | 22.5 | 24.2 | 60.3 | 82.1 |
| 21. SEQID326 | 75 | 76.1 | 69.9 | 72.9 | 74.1 | 64.2 | 59.7 | 72.7 | 31 | 28.8 | 24.5 | 30.7 | 53.5 | 81.1 |
| 22. SEQID328 | 76.2 | 78.1 | 68.8 | 74.7 | 73.5 | 69 | 65.2 | 7.3 | 30.2 | 28.5 | 23.6 | 29.2 | 54.2 | 82.7 |
| 23. SEQID330 | 70.5 | 69.3 | 89.2 | 99.4 | 66.5 | 64.5 | 57.8 | 72.7 | 33.6 | 29.5 | 24.8 | 29.2 | 53 | 74.7 |
| 24. SEQID332 | 70.1 | 71.8 | 89.8 | 94.6 | 67.1 | 63.8 | 57.1 | 70.9 | 35.4 | 29.2 | 23.9 | 32.1 | 50.9 | 76.1 |
| 25. SEQID334 | 57.3 | 66.7 | 55.7 | 59 | 55.9 | 58.6 | 60.4 | 57 | 30.2 | 28.5 | 22.5 | 26 | 44.4 | 64.1 |
| 26. SEQID336 | 70.6 | 64.7 | 68.8 | 71.2 | 73.5 | 58.8 | 56.5 | 72.1 | 34.3 | 28.8 | 26.2 | 27.4 | 53.5 | 73.5 |
| 27. SEQID338 | 72 | 75.3 | 76.7 | 81.3 | 69.4 | 68.2 | 66.2 | 70.3 | 35.4 | 28.5 | 23.1 | 27.1 | 52.6 | 79.5 |
| 28. SEQID340 | 66.1 | 63.9 | 85.2 | 84.2 | 63.4 | 56.8 | 51.9 | 75.4 | 35.4 | 30.9 | 25.4 | 32.1 | 47 | 67.8 |
| | 15 | 16 | 17 | 18 | 19 | 20 | 21 | 22 | 23 | 24 | 25 | 26 | 27 | 28 |
| 1. SEQID286 | 71.5 | 71.3 | 69 | 67.9 | 66.3 | 67.1 | 63.2 | 65.3 | 61.4 | 60.3 | 40.8 | 60.1 | 64.1 | 57.8 |
| 2. SEQID288 | 81.1 | 75.5 | 74.3 | 69.2 | 65.9 | 70.4 | 68.1 | 67.9 | 59.6 | 63.1 | 46.3 | 58.2 | 66.3 | 57 |
| 3. SEQID290 | 61.3 | 63 | 63 | 63.5 | 61.6 | 58.7 | 60.4 | 59.3 | 83.7 | 87.5 | 38.8 | 56.9 | 69.5 | 79.9 |
| 4. SEQID292 | 66.7 | 67.8 | 65.5 | 69.8 | 65.9 | 65.1 | 61.7 | 64 | 99.4 | 91 | 44.5 | 59.1 | 75.4 | 80.5 |
| 5. SEQID294 | 60.6 | 64.1 | 62.9 | 63.7 | 65.1 | 57.6 | 62.6 | 62 | 57.6 | 57.3 | 38.3 | 59.6 | 62.8 | 55.3 |
| 6. SEQID296 | 55.1 | 52.3 | 53.2 | 51.8 | 53.1 | 53.8 | 52.4 | 55.6 | 55.4 | 51.5 | 41.1 | 46.4 | 57.1 | 48.6 |
| 7. SEQID298 | 43.9 | 43.5 | 41.3 | 44.5 | 38.8 | 42.3 | 40.8 | 43 | 42.3 | 41.3 | 42 | 39.1 | 46.6 | 38.5 |
| 8. SEQID300 | 64.6 | 69.5 | 65.7 | 67.4 | 65 | 61.4 | 65.7 | 66.1 | 62.5 | 64.9 | 41.2 | 62.7 | 64 | 65.4 |
| 9. SEQID302 | 21.2 | 23.1 | 23.4 | 24.5 | 20.5 | 23.4 | 23.4 | 23.1 | 23.7 | 24.8 | 23.8 | 23.4 | 24.7 | 24.8 |
| 10. SEQID304 | 18.8 | 20 | 19.8 | 20.7 | 19.8 | 19.5 | 20.3 | 20.3 | 20.3 | 20.8 | 21.5 | 20.3 | 20.8 | 21.9 |
| 11. SEQID306 | 16.3 | 17.5 | 16.9 | 18.9 | 17.1 | 16.3 | 17.2 | 17.5 | 17.3 | 17.6 | 17.5 | 18.1 | 16.8 | 18.1 |
| 12. SEQID308 | 19.9 | 20 | 21.5 | 23.1 | 21.1 | 18.5 | 23 | 22.3 | 22.5 | 23.2 | 19.4 | 18.6 | 20.4 | 23.2 |
| 13. SEQID310 | 52.6 | 53.2 | 50.6 | 52.9 | 48.9 | 54 | 49.4 | 50 | 46.2 | 43.4 | 29.1 | 46.8 | 48.4 | 41.9 |
| 14. SEQID312 | 78.3 | 77.8 | 81.1 | 74.7 | 67.6 | 76.4 | 69.7 | 70.2 | 64.5 | 62.4 | 41.4 | 63.5 | 69.8 | 57.8 |
| 15. SEQID314 | | 80.9 | 80.4 | 78.2 | 67.8 | 77 | 71.3 | 72 | 66.1 | 66.7 | 43.9 | 67.1 | 71.9 | 61.8 |
| 16. SEQID316 | 90.7 | | 82.9 | 80 | 73.5 | 79.2 | 78 | 78.1 | 67.8 | 68 | 47.1 | 67.1 | 77.4 | 63.4 |
| 17. SEQID318 | 88.7 | 92.1 | | 76.3 | 68.6 | 72.9 | 73.6 | 71.6 | 65.5 | 66.7 | 42.9 | 65.9 | 73 | 62.9 |
| 18. SEQID320 | 84.5 | 89 | 86.5 | | 71.8 | 72 | 79 | 82.9 | 69.2 | 66.5 | 43.8 | 70.6 | 72.5 | 62.4 |
| 19. SEQID322 | 73.4 | 79.3 | 76.3 | 78.1 | | 65.9 | 73.8 | 72.1 | 65.4 | 62.4 | 43.4 | 64.1 | 66.9 | 64.7 |
| 20. SEQID324 | 84.5 | 87.3 | 83.4 | 80.6 | 73.4 | | 67.1 | 68.2 | 65.1 | 62.7 | 45.5 | 63.2 | 70.7 | 57.5 |
| 21. SEQID326 | 81.8 | 84.9 | 81.1 | 86.8 | 79.3 | 77.4 | | 91.9 | 61.7 | 59.8 | 43 | 67.6 | 69.5 | 62 |
| 22. SEQID328 | 83.2 | 86.5 | 81.3 | 91 | 78.1 | 79.4 | 94.3 | | 64.2 | 63.2 | 44.1 | 65.9 | 70.2 | 58.3 |
| 23. SEQID330 | 72.9 | 78.9 | 75.9 | 78.9 | 74.6 | 74.1 | 72.3 | 74.7 | | 90.4 | 44.5 | 58.6 | 75.4 | 80 |
| 24. SEQID332 | 74.8 | 81 | 76.7 | 78.5 | 74 | 73.6 | 74.2 | 75.5 | 94 | | 42.7 | 57.4 | 73.3 | 803 |
| 25. SEQID334 | 66.2 | 64.7 | 63.6 | 62.6 | 58.6 | 65.8 | 59.1 | 61.3 | 59 | 60.1 | | 40 | 46 | 38.4 |
| 26. SEQID336 | 72.4 | 73.5 | 74.7 | 77.1 | 73.5 | 72.4 | 74.1 | 73.5 | 70.6 | 69.4 | 54.1 | | 63.2 | 54.5 |
| 27. SEQID338 | 79.9 | 85.1 | 81.8 | 81.3 | 74 | 79.9 | 76.1 | 78.7 | 80.7 | 80.4 | 64.3 | 71.8 | | 69 |
| 28. SEQID340 | 67.2 | 71.6 | 69.4 | 69.4 | 72.1 | 65.6 | 71 | 68.3 | 83.6 | 83.6 | 51.9 | 67.2 | 73.2 | |

### Example 43

### Identification of Domains Comprised in Polypeptide Sequences Useful in Performing the Methods of the Invention

[0959] The Integrated Resource of Protein Families, Domains and Sites (InterPro) database is an integrated interface for the commonly used signature databases for text- and sequence-based searches. The InterPro database combines these databases, which use different methodologies and varying degrees of biological information about well-characterized proteins to derive protein signatures. Collaborating databases include SWISS-PROT, PROSITE, TrEMBL, PRINTS, ProDom and Pfam, Smart and TIGRFAMs. Interpro is hosted at the European Bioinformatics Institute in the United Kingdom.

[0960] The results of the InterPro scan of the polypeptide sequence as represented by SEQ ID NO: 286 are presented in Table L.

TABLE L
InterPro scan results of the polypeptide sequence as represented
by SEQ ID NO: 286

| Database | Accession number | Accession name |
|---|---|---|
| InterPro | IPR001878 | Zinc finger, RanBP2-type |
| PROFILE | PS50199 | ZF_RANBP2_2 |
| PROSITE | PS01358 | ZF_RANBP2_1 |
| PFAM | PF00641 | zf-RanBP |
| SMART | SM00547 | ZnF_RBZ |

### Example 44

### Topology Prediction of the Polypeptide Sequences Useful in Performing the Methods of the Invention (Subcellular Localization, Transmembrane . . . )

[0961] TargetP 1.1 predicts the subcellular location of eukaryotic proteins. The location assignment is based on the predicted presence of any of the N-terminal pre-sequences: chloroplast transit peptide (cTP), mitochondrial targeting peptide (mTP) or secretory pathway signal peptide (SP). Scores on which the final prediction is based are not really probabilities, and they do not necessarily add to one. However, the location with the highest score is the most likely according to TargetP, and the relationship between the scores (the reliability class) may be an indication of how certain the prediction is. The reliability class (RC) ranges from 1 to 5, where 1 indicates the strongest prediction. TargetP is maintained at the server of the Technical University of Denmark.

[0962] For the sequences predicted to contain an N-terminal presequence a potential cleavage site can also be predicted.

[0963] A number of parameters were selected, such as organism group (non-plant or plant), cutoff sets (none, predefined set of cutoffs, or user-specified set of cutoffs), and the calculation of prediction of cleavage sites (yes or no).

[0964] The results of TargetP 1.1 analysis of the polypeptide sequence as represented by SEQ ID NO: 286 are presented Table M. The “plant” organism group has been selected, no cutoffs defined, and the predicted length of the transit peptide requested. There is no clear prediction of the subcellular localisation, only a weak prediction for a mitochondrial localisation (reliability class 5, which is the lowest reliability). SYB1 proteins therefore may also be located in the cytoplasm.

TABLE M
TargetP 1.1 analysis of the polypeptide sequence as represented by
SEQ ID NO: 286

| | |
|---|---|
| Length (AA) | 164 |
| Chloroplastic transit peptide | 0.417 |
| Mitochondrial transit peptide | 0.505 |
| Secretory pathway signal peptide | 0.014 |
| Other subcellular targeting | 0.184 |
| Predicted Location | Mitochondrial |
| Reliability class | 5 |
| Predicted transit peptide length | 12 |

[0965] Many other algorithms can be used to perform such analyses, including:
[0966] ChloroP 1.1 hosted on the server of the Technical University of Denmark;
[0967] Protein Prowler Subcellular Localisation Predictor version 1.2 hosted on the server of the Institute for Molecular Bioscience, University of Queensland, Brisbane, Australia;
[0968] PENCE Proteome Analyst PA-GOSUB 2.5 hosted on the server of the University of Alberta, Edmonton, Alberta, Canada;

### Example 45

### Assay Related to the Polypeptide Sequences Useful in Performing the Methods of the Invention

[0969] The polypeptide sequence as represented by SEQ ID NO: 286 may interact with nucleic acids as well as with proteins, by virtue of the presence of the Zinc finger domains. DNA binding assays are well known in the art, including PCR-assisted DNA binding site selection and a DNA binding gel-shift assay; for a general reference, see Current Protocols in Molecular Biology, Volumes 1 and 2, Ausubel et al. (1994), Current Protocols.

[0970] The protein represented by SEQ ID NO: 286 is predicted to interact with several proteins (results from analysis with the SMART database), as shown in Table N. The functionality of a SYB1 protein may thus be tested in a yeast two-hybrid screen with candidate ligand proteins.

TABLE N
Putative interactors of SEQ ID NO: 286

| Description | Identifier |
|---|---|
| putative cytochrome P450 | At2g46960 |
| Unknown | At5g03670 |
| weak similarity to cytochrome b558/566, subunit B | F18B3.90 |
| hypersensitive-induced response protein | MQB2.6″ |
| glycosyl hydrolase family 9 | T21L14.7 |
| Unknown | F26O13.50 |
| brix domain-containing protein | At5g61770 |
| peterpan | At5g61770 |
| Unknown/Predicted GTPase | Q9SJF1/At1g08410 |
| Nucleotide binding protein | Q9SHS8/At2g27200 |

[0971] Furthermore, expression of a SYB1 protein according to the methods of the present invention results in increased seed yield as described below.

### Example 46

### Cloning of Nucleic Acid Sequence as Represented by SEQ ID NO: 285

[0972] Unless otherwise stated, recombinant DNA techniques are performed according to standard protocols described in (Sambrook (2001) Molecular Cloning: a laboratory manual, 3rd Edition Cold Spring Harbor Laboratory Press, CSH, New York) or in Volumes 1 and 2 of Ausubel et al. (1994), Current Protocols in Molecular Biology, Current Protocols. Standard materials and methods for plant molecular work are described in Plant Molecular Biology Labfax (1993) by R. D. D. Croy, published by BIOS Scientific Publications Ltd (UK) and Blackwell Scientific Publications (UK).

[0973] The Arabidopsis thaliana SYB1 gene was amplified by PCR using as template an Arabidopsis thaliana seedling cDNA library (Invitrogen, Paisley, UK). After reverse transcription of RNA extracted from seedlings, the cDNAs were cloned into pCMV Sport 6.0. Average insert size of the bank was 1.5 kb and the original number of clones was of the order of 1.59×107 cfu. Original titer was determined to be 9.6×105 cfu/ml after first amplification of 6×1011 cfu/ml. After plasmid extraction, 200 ng of template was used in a 50 μl PCR mix. Primers prm5539 (SEQ ID NO: 341; sense, start codon in bold, AttB1 site in italic: 5′-ggggacaagtttgtacaaaaaagcaggcttaaacaatgagcagacccggagatt-3′) and prm5540 (SEQ ID NO: 342; reverse, complementary, AttB2 site in italic: 5′-ggggaccactttgtacaagaaagctgggtagacaaggctacttcaaaagca-3′), which include the AttB sites for Gateway recombination, were used for PCR amplification. PCR was performed using Hifi Taq DNA polymerase in standard conditions. A PCR fragment of 559 bp (including attB sites) was amplified and purified also using standard methods. The first step of the Gateway procedure, the BP reaction, was then performed, during which the PCR fragment recombines in vivo with the pDONR201 plasmid to produce, according to the Gateway terminology, an “entry clone”, p58a. Plasmid pDONR201 was purchased from Invitrogen, as part of the Gateway® technology.

### Example 47

### Expression Vector Construction Using the Nucleic Acid Sequence as Represented by SEQ ID NO: 285

[0974] The entry clone p58a was subsequently used in an LR reaction with p0640, a destination vector used for Oryza sativa transformation. This vector contains as functional elements within the T-DNA borders: a plant selectable marker; a screenable marker expression cassette; and a Gateway cassette intended for LR in vivo recombination with the nucleic acid sequence of interest already cloned in the entry clone. A rice GOS2 promoter (SEQ ID NO: 343) for constitutive expression (pGOS2) was located upstream of this Gateway cassette.

[0975] After the LR recombination step, the resulting expression vector pGOS2::SYB1 (FIG. 24) was transformed into Agrobacterium strain LBA4044 according to methods well known in the art.

### Example 48

### Plant Transformation

### Rice Transformation

[0976] The Agrobacterium containing the expression vector was used to transform Oryza sativa plants. Mature dry seeds of the rice japonica cultivar Nipponbare were dehusked. Sterilization was carried out by incubating for one minute in 70% ethanol, followed by 30 minutes in 0.2% HgCl2, followed by a 6 times 15 minutes wash with sterile distilled water. The sterile seeds were then germinated on a medium containing 2,4-D (callus induction medium). After incubation in the dark for four weeks, embryogenic, scutellum-derived calli were excised and propagated on the same medium. After two weeks, the calli were multiplied or propagated by subculture on the same medium for another 2 weeks. Embryogenic callus pieces were sub-cultured on fresh medium 3 days before co-cultivation (to boost cell division activity).

[0977] Agrobacterium strain LBA4404 containing the expression vector was used for cocultivation. Agrobacterium was inoculated on AB medium with the appropriate antibiotics and cultured for 3 days at 28° C. The bacteria were then collected and suspended in liquid co-cultivation medium to a density (OD600) of about 1. The suspension was then transferred to a Petri dish and the calli immersed in the suspension for 15 minutes. The callus tissues were then blotted dry on a filter paper and transferred to solidified, co-cultivation medium and incubated for 3 days in the dark at 25° C. Co-cultivated calli were grown on 2,4-D-containing medium for 4 weeks in the dark at 28° C. in the presence of a selection agent. During this period, rapidly growing resistant callus islands developed. After transfer of this material to a regeneration medium and incubation in the light, the embryogenic potential was released and shoots developed in the next four to five weeks. Shoots were excised from the calli and incubated for 2 to 3 weeks on an auxin-containing medium from which they were transferred to soil. Hardened shoots were grown under high humidity and short days in a greenhouse.

[0978] Approximately 35 independent T0 rice transformants were generated for one construct. The primary transformants were transferred from a tissue culture chamber to a greenhouse. After a quantitative PCR analysis to verify copy number of the T-DNA insert, only single copy transgenic plants that exhibit tolerance to the selection agent were kept for harvest of T1 seed. Seeds were then harvested three to five months after transplanting. The method yielded single locus transformants at a rate of over 50% (Aldemita and Hodges 1996, Chan et al. 1993, Hiei et al. 1994).

### Corn Transformation

[0979] Transformation of maize (Zea mays) is performed with a modification of the method described by Ishida et al. (1996) Nature Biotech 14(6): 745-50. Transformation is genotype-dependent in corn and only specific genotypes are amenable to transformation and regeneration. The inbred line A188 (University of Minnesota) or hybrids with A188 as a parent are good sources of donor material for transformation, but other genotypes can be used successfully as well. Ears are harvested from corn plant approximately 11 days after pollination (DAP) when the length of the immature embryo is about 1 to 1.2 mm. Immature embryos are cocultivated with Agrobacterium tumefaciens containing the expression vector, and transgenic plants are recovered through organogenesis. Excised embryos are grown on callus induction medium, then maize regeneration medium, containing the selection agent (for example imidazolinone but various selection markers can be used). The Petri plates are incubated in the light at 25° C. for 2-3 weeks, or until shoots develop. The green shoots are transferred from each embryo to maize rooting medium and incubated at 25° C. for 2-3 weeks, until roots develop. The rooted shoots are transplanted to soil in the greenhouse. T1 seeds are produced from plants that exhibit tolerance to the selection agent and that contain a single copy of the T-DNA insert.

### Wheat Transformation

[0980] Transformation of wheat is performed with the method described by Ishida et al. (1996) Nature Biotech 14(6): 745-50. The cultivar Bobwhite (available from CIMMYT, Mexico) is commonly used in transformation. Immature embryos are co-cultivated with Agrobacterium tumefaciens containing the expression vector, and transgenic plants are recovered through organogenesis. After incubation with Agrobacterium, the embryos are grown in vitro on callus induction medium, then regeneration medium, containing the selection agent (for example imidazolinone but various selection markers can be used). The Petri plates are incubated in the light at 25° C. for 2-3 weeks, or until shoots develop. The green shoots are transferred from each embryo to rooting medium and incubated at 25° C. for 2-3 weeks, until roots develop. The rooted shoots are transplanted to soil in the greenhouse. T1 seeds are produced from plants that exhibit tolerance to the selection agent and that contain a single copy of the T-DNA insert.

### Soybean Transformation

[0981] Soybean is transformed according to a modification of the method described in the Texas A&M patent U.S. Pat. No. 5,164,310. Several commercial soybean varieties are amenable to transformation by this method. The cultivar Jack (available from the Illinois Seed foundation) is commonly used for transformation. Soybean seeds are sterilised for in vitro sowing. The hypocotyl, the radicle and one cotyledon are excised from seven-day old young seedlings. The epicotyl and the remaining cotyledon are further grown to develop axillary nodes. These axillary nodes are excised and incubated with Agrobacterium tumefaciens containing the expression vector. After the cocultivation treatment, the explants are washed and transferred to selection media. Regenerated shoots are excised and placed on a shoot elongation medium. Shoots no longer than 1 cm are placed on rooting medium until roots develop. The rooted shoots are transplanted to soil in the greenhouse. T1 seeds are produced from plants that exhibit tolerance to the selection agent and that contain a single copy of the T-DNA insert.

### Rapeseed/Canola Transformation

[0982] Cotyledonary petioles and hypocotyls of 5-6 day old young seedling are used as explants for tissue culture and transformed according to Babic et al. (1998, Plant Cell Rep 17: 183-188). The commercial cultivar Westar (Agriculture Canada) is the standard variety used for transformation, but other varieties can also be used. Canola seeds are surface-sterilized for in vitro sowing. The cotyledon petiole explants with the cotyledon attached are excised from the in vitro seedlings, and inoculated with Agrobacterium (containing the expression vector) by dipping the cut end of the petiole explant into the bacterial suspension. The explants are then cultured for 2 days on MSBAP-3 medium containing 3 mg/l BAP, 3% sucrose, 0.7 Phytagar at 23° C., 16 hr light. After two days of co-cultivation with Agrobacterium, the petiole explants are transferred to MSBAP-3 medium containing 3 mg/l BAP, cefotaxime, carbenicillin, or timentin (300 mg/l) for 7 days, and then cultured on MSBAP-3 medium with cefotaxime, carbenicillin, or timentin and selection agent until shoot regeneration. When the shoots are 5-10 mm in length, they are cut and transferred to shoot elongation medium (MSBAP-0.5, containing 0.5 mg/l BAP). Shoots of about 2 cm in length are transferred to the rooting medium (MS0) for root induction. The rooted shoots are transplanted to soil in the greenhouse. T1 seeds are produced from plants that exhibit tolerance to the selection agent and that contain a single copy of the T-DNA insert.

### Alfalfa Transformation

[0983] A regenerating clone of alfalfa (Medicago sativa) is transformed using the method of (McKersie et al., 1999 Plant Physiol 119: 839-847). Regeneration and transformation of alfalfa is genotype dependent and therefore a regenerating plant is required. Methods to obtain regenerating plants have been described. For example, these can be selected from the cultivar Rangelander (Agriculture Canada) or any other commercial alfalfa variety as described by Brown D C W and A Atanassov (1985. Plant Cell Tissue Organ Culture 4: 111-112). Alternatively, the RA3 variety (University of Wisconsin) has been selected for use in tissue culture (Walker et al., 1978 Am J Bot 65:654-659). Petiole explants are cocultivated with an overnight culture of Agrobacterium tumefaciens C58C1 pMP90 (McKersie et al., 1999 Plant Physiol 119: 839-847) or LBA4404 containing the expression vector. The explants are cocultivated for 3 d in the dark on SH induction medium containing 288 mg/L Pro, 53 mg/L thioproline, 4.35 g/L K2SO4, and 100 μm acetosyringinone. The explants are washed in half-strength Murashige-Skoog medium (Murashige and Skoog, 1962) and plated on the same SH induction medium without acetosyringinone but with a suitable selection agent and suitable antibiotic to inhibit Agrobacterium growth. After several weeks, somatic embryos are transferred to BOi2Y development medium containing no growth regulators, no antibiotics, and 50 g/L sucrose. Somatic embryos are subsequently germinated on half-strength Murashige-Skoog medium. Rooted seedlings were transplanted into pots and grown in a greenhouse. T1 seeds are produced from plants that exhibit tolerance to the selection agent and that contain a single copy of the T-DNA insert.

### Example 49

### Phenotypic Evaluation Procedure

### 49.1 Evaluation Setup

[0984] Approximately 35 independent T0 rice transformants were generated. The primary transformants were transferred from a tissue culture chamber to a greenhouse for growing and harvest of T1 seed. Six events, of which the T1 progeny segregated 3:1 for presence/absence of the transgene, were retained. For each of these events, approximately 10 T1 seedlings containing the transgene (hetero- and homo-zygotes) and approximately 10 T1 seedlings lacking the transgene (nullizygotes) were selected by monitoring visual marker expression. The transgenic plants and the corresponding nullizygotes were grown side-by-side at random positions. Greenhouse conditions were of shorts days (12 hours light), 28° C. in the light and 22° C. in the dark, and a relative humidity of 70%.

### Drought Screen

[0985] Plants from T2 seeds are grown in potting soil under normal conditions until they approached the heading stage. They are then transferred to a “dry” section where irrigation is withheld. Humidity probes are inserted in randomly chosen pots to monitor the soil water content (SWC). When SWC goes below certain thresholds, the plants are automatically re-watered continuously until a normal level was reached again. The plants are then re-transferred again to normal conditions. The rest of the cultivation (plant maturation, seed harvest) is the same as for plants not grown under abiotic stress conditions. Growth and yield parameters are recorded as detailed for growth under normal conditions.

### Nitrogen Use Efficiency Screen

[0986] Rice plants from T2 seeds are grown in potting soil under normal conditions except for the nutrient solution. The pots are watered from transplantation to maturation with a specific nutrient solution containing reduced N nitrogen (N) content, usually between 7 to 8 times less. The rest of the cultivation (plant maturation, seed harvest) is the same as for plants not grown under abiotic stress. Growth and yield parameters are recorded as detailed for growth under normal conditions.

[0987] Four T1 events were further evaluated in the T2 generation following the same evaluation procedure as for the T1 generation but with more individuals per event. From the stage of sowing until the stage of maturity the plants were passed several times through a digital imaging cabinet. At each time point digital images (2048×1536 pixels, 16 million colours) were taken of each plant from at least 6 different angles.

### 49.2 Statistical Analysis: F-Test

[0988] A two factor ANOVA (analysis of variants) was used as a statistical model for the overall evaluation of plant phenotypic characteristics. An F-test was carried out on all the parameters measured of all the plants of all the events transformed with the gene of the present invention. The F-test was carried out to check for an effect of the gene over all the transformation events and to verify for an overall effect of the gene, also known as a global gene effect. The threshold for significance for a true global gene effect was set at a 5% probability level for the F-test. A significant F-test value points to a gene effect, meaning that it is not only the mere presence or position of the gene that is causing the differences in phenotype.

### 49.3 Parameters Measured

### Biomass-Related Parameter Measurement

[0989] From the stage of sowing until the stage of maturity the plants were passed several times through a digital imaging cabinet. At each time point digital images (2048×1536 pixels, 16 million colours) were taken of each plant from at least 6 different angles.

[0990] The plant aboveground area (or leafy biomass) was determined by counting the total number of pixels on the digital images from aboveground plant parts discriminated from the background. This value was averaged for the pictures taken on the same time point from the different angles and was converted to a physical surface value expressed in square mm by calibration. Experiments show that the aboveground plant area measured this way correlates with the biomass of plant parts above ground. The above ground area is the time point at which the plant had reached its maximal leafy biomass. The early vigour is the plant (seedling) aboveground area three weeks post-germination. Increase in root biomass is expressed as an increase in total root biomass (measured as maximum biomass of roots observed during the lifespan of a plant); or as an increase in the root/shoot index (measured as the ratio between root mass and shoot mass in the period of active growth of root and shoot).

### Seed-Related Parameter Measurements

[0991] The mature primary panicles were harvested, counted, bagged, barcode-labelled and then dried for three days in an oven at 37° C. The panicles were then threshed and all the seeds were collected and counted. The filled husks were separated from the empty ones using an air-blowing device. The empty husks were discarded and the remaining fraction was counted again. The filled husks were weighed on an analytical balance. The number of filled seeds was determined by counting the number of filled husks that remained after the separation step. The total seed yield was measured by weighing all filled husks harvested from a plant. Total seed number per plant was measured by counting the number of husks harvested from a plant. Thousand Kernel Weight (TKW) is extrapolated from the number of filled seeds counted and their total weight. The Harvest Index (HI) in the present invention is defined as the ratio between the total seed yield and the above ground area (mm²), multiplied by a factor 106. The total number of flowers per panicle as defined in the present invention is the ratio between the total number of seeds and the number of mature primary panicles. The seed fill rate as defined in the present invention is the proportion (expressed as a %) of the number of filled seeds over the total number of seeds (or florets).

### Example 50

### Results of the Phenotypic Evaluation of the Transgenic Plants

[0992] The results of the evaluation of transgenic rice plants expressing the nucleic acid sequence useful in performing the methods of the invention are presented in Table O. The percentage difference between the transgenics and the corresponding nullizygotes is also shown, with a P value from the F test below 0.05.

[0993] Total seed yield, number of filled seeds, seed fill rate, harvest index and thousand kernel weight are significantly increased in the transgenic plants expressing the nucleic acid sequence useful in performing the methods of the invention, compared to the control plants (in this case, the nullizygotes).

TABLE O
Results of the evaluation of transgenic rice plants expressing the
nucleic acid sequence useful in performing the methods
of the invention.

| | | % Increase |
|---|---|---|
| Trait | % Increase (T1 generation) | (T2 generation) |
| Total seed yield | 20 | 23 |
| Number of filled seeds | 17 | 19 |
| Fill rate | 12 | 20 |
| Harvest index | 15 | 20 |
| Thousand Kernel Weight | 2 | 4 |

1. A method for increasing yield in a plant relative to a control plant, comprising increasing expression in a plant of a nucleic acid encoding a cpFBPase polypeptide, and optionally selecting for a plant having increased yield relative to a control plant, wherein said cpFBPase polypeptide functions in the chloroplast and comprises (i) at least one FBPase domain, and (ii) at least one redox regulatory insertion.

2. The method of claim 1, wherein said increased expression is effected by any one or more of T-DNA activation, TILLING, and homologous recombination.

3. The method of claim 1, wherein said increased expression is effected by introducing and expressing in the plant a nucleic acid encoding said cpFBPase polypeptide.

4. The method of claim 3, wherein said nucleic acid is:
(i) a portion of a cpFBPase nucleic acid;
(ii) a nucleic acid capable of hybridizing with a cpFBPase nucleic acid;
(iii) a splice variant of a cpFBPase nucleic acid;
(iv) an allelic variant of a cpFBPase nucleic acid;
(v) a cpFBPase nucleic acid obtained by gene shuffling; or
(vi) a cpFBPase nucleic acid obtained by site-directed mutagenesis.

5. The method of claim 1, wherein said nucleic acid encodes any one of the cpFBPase polypeptides given in Table C, or an orthologue or paralogue of any of the cpFBPase polypeptides.

6. The method of claim 1, wherein said nucleic acid originates from a photosynthetic cell, from a land plant, or from green algae.

7. The method of claim 1, wherein said nucleic acid encodes a cpFBPase polypeptide comprising the amino acid sequence of SEQ ID NO: 155.

8. The method of claim 3, wherein said nucleic acid is operably linked to a promoter capable of driving expression in aboveground parts of a plant.

9. The method of claim 8, wherein said promoter is a constitutive promoter or a GOS2 promoter.

10. The method of claim 1, wherein said increased yield is one or more of i) increased seed weight, ii) increased number of filled seeds, iii) increased seed fill rate, and iv) increased harvest index.

11. A plant obtained by the method of claim 1, or a plant part, plant cell, seed, or progeny thereof, wherein said plant, or said plant part, plant cell, seed, or progeny thereof, comprises a recombinant nucleic acid encoding said cpFBPase polypeptide operably linked to a promoter driving expression in aboveground parts of said plant.

12. A construct comprising:
(i) a nucleic acid encoding a cpFBPase polypeptide;
(ii) one or more control sequences capable of driving expression of the nucleic acid of (i) in aboveground parts of a plant; and optionally
(iii) a transcription termination sequence.

13. The construct of claim 12, wherein said nucleic acid originates from green algae, and wherein said control sequence is a GOS2 promoter.

14. A method for increasing yield in a plant relative to a control plant, comprising transforming the construct of claim 12 into a plant, plant part, or plant cell.

15. A plant, plant part, or plant cell comprising the construct of claim 12.

16. A method for the production of a transgenic plant having increased yield relative to a control plant, comprising:
(i) introducing and expressing in aboveground parts of a plant a nucleic acid encoding a cpFBPase polypeptide; and
(ii) cultivating the plant under conditions promoting plant growth and development.

17. A transgenic plant having increased yield relative to a control plant, said increased yield resulting from increased expression in aboveground parts of a plant of the construct of claim 12.

18. The transgenic plant of claim 17, wherein said plant is a crop plant, a monocot, or a cereal, or wherein said plant is rice, maize, wheat, barley, millet, rye, sorghum, or oat.

19. Harvestable parts of the transgenic plant of claim 17, wherein said harvestable parts are seeds.

20. Products derived from the transgenic plant of claim 17 or from harvestable parts of said plant.

The application's sequence listing, which the Patent Office published only in electronic form, follows.

SEQUENCE LISTING (424 sequences)

SEQ ID NO: 1 - DNA, 2151 bp, Arabidopsis thaliana
atgtgctgtggatcagaccgattaaaccagatcgtgtcatcaagatcttcgttgccaatttctttcgaggaagataacaatcttgttaccaacacagacatgaatcacttaacagtcgaaacagaggatacgtttgcgagcttgcttgagcttgcagctaacaacgatgttgaaggtgtaaggctatctatcgagagagacccttcttgtgtagacgaagctggtctctggtacggtcgtcaaaaaggttctaaagctatggtcaacgattacaggactccgttgatggttgctgctacttacggaagcattgatgtgatcaagcttattgtttctttgactgatgctgacgtgaaccgtgcttgcgggaatgatcagaccactgcgttacactgcgctgcttctggaggagctgtgaatgctatccaagttgttaagctgcttcttgcagctggagctgatttgaatctgttggatgctgaaggtcaacgagctggtgatgttattgttgttcctcctaagcttgaaggcgtgaagctgatgcttcaggagcttctttctgctgatggatcatctactgcggagcggaatctacgggttgtgacaaatgttccgaatagaagctcatctccgtgtcattctcctactggagagaatggtggatcagggtctggttcaccgctcggctctccttttaagctgaaatctactgaattcaagaaagagtatccggttgatccgtctttgccagatatcaagaacagtatctacgcgactgatgagtttagaatgtattccttcaaggtccggccttgctctcgtgcttattcacatgattggactgagtgtccttttgttcacccgggtgaaaacgcgaggaggagagacccgaggaagttccattacagctgcgttccttgcccggattttaggaaaggagcttgtaggagaggagatatgtgtgagtatgcgcacggtgtgtttgaatgctggcttcatccggctcagtacaggacccgtctttgcaaagatggaacaggctgtgctcggcgggtttgtttctttgcgcatacacccgaggagcttcgacctttgtacgcatcaactggttcagcggttccttcgcctagatcgaatgctgattatgcagctgctttgagtctccttcctggttctccatcaggagtctctgtcatgtccccgctttccccatcagcagcggggaacggaatgtctcattcgaatatggcttggccacaaccaaatgtccctgcgttgcacttaccaggaagcaatctacagtcaagcaggctaaggtcttctctcaatgcaagggatatcccgacggatgagttcaatatgttagcggattacgagcagcagcaactcctcaacgagtattccaatgctctgagccgttctggtcggatgaaatcaatgcctccttcgaatcttgaagatcttttctcagcagaaggctcttcatctccccggttcactgattccgctttagcttccgcggtgttctcgcctacacacaagtcagctgtcttcaaccagttccaacaacagcaacagcagcagcagagcatgttgtctccaatcaacacaagcttttcttcaccaaagagcgttgaccactcattgttttcaggtggaggaagaatgtctcctcggaatgttgttgaaccaatatcacccatgagtgctcgggtttccatgttggctcagtgcgtgaagcaacaacaacagcaacagcagcagcagcagcagcaacatcagttccgtagccttagctccagagagctcagaacaaactctagcccaatcgttggttcaccggtaaacaacaacacatggtcatcaaaatggggatcttcaaatggtcaaccggattggggaatgagctcagaagcacttggtaagttgagatcttcgtcatcgtttgatggtgatgagcctgatgtgtcatgggtccagtcactggtgaaggagactccagcagaagccaaagagaaagcagcaacatcttcctcaggggaacacgtgatgaagcagccaaatccggttgaaccggtaatggatcatgctgggctagaagcttggattgagcaaatgcagctcgatcagcttgtggctcagcagaattga

SEQ ID NO: 2 - protein, 716 aa, Arabidopsis thaliana
MCCGSDRLNQIVSSRSSLPISFEEDNNLVTNTDMNHLTVETEDTFASLLELAANNDVEGVRLSIERDPSCVDEAGLWYGRQKGSKAMVNDYRTPLMVAATYGSIDVIKLIVSLTDADVNRACGNDQTTALHCAASGGAVNAIQVVKLLLAAGADLNLLDAEGQRAGDVIVVPPKLEGVKLMLQELLSADGSSTAERNLRVVTNVPNRSSSPCHSPTGENGGSGSGSPLGSPFKLKSTEFKKEYPVDPSLPDIKNSIYATDEFRMYSFKVRPCSRAYSHDWTECPFVHPGENARRRDPRKFHYSCVPCPDFRKGACRRGDMCEYAHGVFECWLHPAQYRTRLCKDGTGCARRVCFFAHTPEELRPLYASTGSAVPSPRSNADYAAALSLLPGSPSGVSVMSPLSPSAAGNGMSHSNMAWPQPNVPALHLPGSNLQSSRLRSSLNARDIPTDEFNMLADYEQQQLLNEYSNALSRSGRMKSMPPSNLEDLFSAEGSSSPRFTDSALASAVFSPTHKSAVFNQFQQQQQQQQSMLSPINTSFSSPKSVDHSLFSGGGRMSPRNVVEPISPMSARVSMLAQCVKQQQQQQQQQQQQHQFRSLSSRELRTNSSPIVGSPVNNNTWSSKWGSSNGQPDWGMSSEALGKLRSSSSFDGDEPDVSWVQSLVKETPAEAKEKAATSSSGEHVMKQPNPVEPVMDHAGLEAWIEQMQLDQLVAQQN

SEQ ID NO: 3 - protein, 13 aa, Artificial sequence
  motif 1
  VARIANT (1)..(1): Xaa is Pro or Ala
  VARIANT (7)..(7): Xaa is Ser or Thr
XCSRAYXHDWTEC

SEQ ID NO: 4 - protein, 12 aa, Artificial sequence
  motif 2
HPGENARRRDPR

SEQ ID NO: 5 - protein, 19 aa, Artificial sequence
  motif 3
  VARIANT (3)..(3): Xaa is Val or Ile
  VARIANT (6)..(6): Xaa is Cys or Ser
  VARIANT (11)..(11): Xaa is Ser or Ala
  VARIANT (14)..(14): Xaa is Lys or Arg
HGXFEXWLHPXQYXTRLCK

SEQ ID NO: 6 - protein, 5 aa, Artificial sequence
  motif 4
CFFAH

SEQ ID NO: 7 - DNA, 54 bp, Artificial sequence
  primer: prm06717
ggggacaagtttgtacaaaaaagcaggcttaaacaatgtgctgtggatcagacc

SEQ ID NO: 8 - DNA, 50 bp, Artificial sequence
  primer: prm06718
ggggaccactttgtacaagaaagctgggtggttaggtctctcaattctgc

SEQ ID NO: 9 - DNA, 981 bp, Oryza sativa
aagaggcaagagcatccgtattaaccagccttttgagacttgagagtgtgtgtgactcgatccagcgtagtttcagttcgtgtgttggtgagtgattccagccaagtttgcgatggcttctcagcaggaacgggctagctaccacgccggcgagaccaaggcccgcgccgaggagaagacggggcgcatgatgggcacggcgcaggagaaggcgcgggaggccaaggacacggcgtccgacgccgcggggcgcgcgatgggcaggggacacggcgccaaggaggcgaccaaggagaaggcgtacgagaccaaggacgcgaccaaggagaaggcgtacgaggcaaaggacgcggcctccgacgccaccggccgcgccatggacaagggccgcggcgccgcgggcgccacgagggacaaggcgtacgatgccaaggacagggcggctgacacggcgcagtccgccgccgaccgcgcccgcgacggcgccgggcagaccgggagctacattggacagaccgccgaggccgccaagcagaaagcggccggcgccgcgcagtacgccaaggagaccgcgatcgccggcaaggacaagaccggcgccgtgctccagcaggcaggggagcaggtgaagagcgtggcggtgggggcgaaggacgcggtgatgtacacgctcgggatgtcaggcgataacaagaacaacgccgctgccggcaaggacaccagcacctacaagcctggaactgggagtgactaccagtaatacggtagaagaagcatgtgtcgtctttggcactgatgccaaagtgtacgtgttgtatcctcttttttaagtttcagctcgacttcgacgtgttcggtgtcacactttggtttttcagttgtgctcaactgttcatgtttctggttccatggagggccagtgtggaggtcaatgtttaagctttcgttttaaaatctgataataaagttggttaagacctg

SEQ ID NO: 10 - DNA, 3372 bp, Eucalyptus grandis
ggaagacgaagagcaacaaaataggtctcactccctcctctctcctctctcctctctcttctttctctctcttctgcttctaacaaagtctcttccttgagagacagggctgcgtcgtcgtctttctctctcctcgctgcgagcttctgagaaagttcaattctttttctcttgttctctctctctacccttctgggtaccactgtgaagctccggtcttttctattttttttttttttgggctatctgggtctgggcaaatccatcgcgcgctctgctctggactgagaggccgtcagtggctttagatctgcgacgcctcttgcttgctcagtgagctgggctagttcaaatcgacgaagaaagcatgcgctagtgattggtgtgggtaatacactgcattcgatctctactaagtatccccaagtatactaagatcccgttctcagccatgagtcaactgaccattcagactgaggacacttttgccagcttgcttgagcttgctgctaacaacgacacagaatctttcggacggtgtgtggaacgtgatccttcgagcatagatgaaattggatattggtatggtcgccaaaagggttcgaagcaggtggtcaatatgcaaagaactcctcttatggtggctgctacatatggtagtgttgatgtaatgagactcattctttgcctatctgatgctgatgtgaatcgaacctgcagcacagacaagagcacagcccttcactgtgctgcctctggtggtgctgtgaatgctgtagatgctgtgaggctactcctgtcagctggtgctgacccaagtttagcagatgctaacggtcagcggcctgtggatgttattgttgttcctccaaagctcctttcaataaagtttgctcttgaagagctcttgtcgaccgaaggatctgtaaatgaacacaatctgagagtgtccgtagccacttccaattcaacctctcccccactttcatcttccccggataatggttccccagcatctgctaattgttcttcccccaagaactcaaagttaagtgatgcccctgttctttatgcatcagaaaagaaggaatacccggtggatccatctcttccagatatcaagaatagcatttactcaacagatgaattccgaatgtattcttttaaagtgcggccttgttcacgagcgtactcgcatgattggacggagtgcccttttgttcatccaggggagaatgcccgtagaagggatccaaggaagttccactacagctgtgtcccttgccctgatttccggaagggtgcttgtagacgtggagatatgtgtgaatatgctcatggtgtttttgagtgctggctccatcctgctcagtatcggactcgattatgcaaggatggtacaagttgtgctcggagagtgtgcttctttgcccacacggagcaagagctgcgtccattgtacgtctccactggttctgctgttccgtctcctcgctcgagtacctctggagctgctgccatggattttgctgcagccatgagcctcttacctggttccccatcatcagtatccatcatgtccccttcacccttcactcctcccatgtctccatctgctaatggtatttctcacccatctgttgcctggccccagcaaaatgtaccaactttgcatcttcccggaagcaatcttcagtccagccgcttgagatcttctcttaatgcaagagatattcctcaggaggattttgacttgctgtcagattatgatgtgcaacagcagcagctcctaaatgagttttccatcctttcacaacaatcgatgggtgctaattccttgaaccgttctggtcggctgaaaactttgaccccctcaaaccttgatgatctcttctctgctgagagctcatcccctcgctacgctgatcaagccctggcttctgctgttttttcaccaacgcacaaatctgcagtaatcaatcaatttcagcagcagcagcagagcatgttatcacccatcaacacaaccttctctcctaagagtgtcgaccaccctttgttgcaagcgtctttcggtgttcaatctgggcgaatgtcccctcgtaacatggatcccatctctcctataagttctcgtgtgtcgatgttggcccaacgagagaaacagcaacagcaattacgcagcctaagctctcgtgaactcggttccaattcagccgccattgtgggttcccccgtgggttcttggtcgaaatggggagctacaaatgggaaaccagactgggctgttagtgcagatgaactaggtaagcttcgcaggtctaattcatttgagcttgggaacaatggtgaggagccagatctttcatgggttcaatccctcgttaaagaatctcctaccgagatgaaagaaaagctttcgtcaactctctctggtgttccagcccccgctacatccagtgaggttccgagtatcagctcgcagatggaatcggttgatcacgaagtgctaggagcatggctccagcagatgcagctcgatccgctcgtggctcagcaaaactaggttgttttttttcctacatggccttgaggaagtagacagcggaaagttttttttggtaaatactatgttttttctggaaatttttgatgctgggggtggggtctggaagaagataacaaggcaggaaaggggtcagtgaagtcactggagaaaaggaattcatttttaaccattttatcattctattacaacagaaagtagggaaaaaaaaggaagaccctctgggttatgaagagaaattaaacccaggctaggcgttctcctttctaatatttccaattttaggtccatattactgtcatttcctttttgccgtcttatcatatttcatcaaaatggaactggggactaatgtttgttccattctttcgctcttctgatttatttgcacccttggggtaagatcaaaagagaaattatgatcattttcttttgaggatatttttttttcccaatatttgtgagaatgaaagttaagaggggatatgatgtgtctggtgttgtagtatgaaaaaccaataaccgagttcacctgttgctgctggtggtagaagaagtggagaagaagctatgatcctttgatgtaacagtcaatcaaacattttaatacctttattttttgtttcctcatgtaatccatcctttgtgattgtcctctctctctctctctctctctctctctccctccccgtgttctttcttcataagcgtcttgcttgtcgatctgtaaattattgaaaagggtcatggaaagccgtgccggtgtggattctcatttttgcaaaaaaaaaaaaaaaaaaaaaaaa

SEQ ID NO: 11 - protein, 704 aa, Eucalyptus grandis
MSQLTIQTEDTFASLLELAANNDTESFGRCVERDPSSIDEIGYWYGRQKGSKQVVNMQRTPLMVAATYGSVDVMRLILCLSDADVNRTCSTDKSTALHCAASGGAVNAVDAVRLLLSAGADPSLADANGQRPVDVIVVPPKLLSIKFALEELLSTEGSVNEHNLRVSVATSNSTSPPLSSSPDNGSPASANCSSPKNSKLSDAPVLYASEKKEYPVDPSLPDIKNSIYSTDEFRMYSFKVRPCSRAYSHDWTECPFVHPGENARRRDPRKFHYSCVPCPDFRKGACRRGDMCEYAHGVFECWLHPAQYRTRLCKDGTSCARRVCFFAHTEQELRPLYVSTGSAVPSPRSSTSGAAAMDFAAAMSLLPGSPSSVSIMSPSPFTPPMSPSANGISHPSVAWPQQNVPTLHLPGSNLQSSRLRSSLNARDIPQEDFDLLSDYDVQQQQLLNEFSILSQQSMGANSLNRSGRLKTLTPSNLDDLFSAESSSPRYADQALASAVFSPTHKSAVINQFQQQQQSMLSPINTTFSPKSVDHPLLQASFGVQSGRMSPRNMDPISPISSRVSMLAQREKQQQQLRSLSSRELGSNSAAIVGSPVGSWSKWGATNGKPDWAVSADELGKLRRSNSFELGNNGEEPDLSWVQSLVKESPTEMKEKLSSTLSGVPAPATSSEVPSISSQMESVDHEVLGAWLQQMQLDPLVAQQN

SEQ ID NO: 12 - DNA, 1860 bp, Oryza sativa
atgggggagcctgggggcgccgaggcggccgtctccgcgaggctgctcgagctggcggccgacgacaacgcggcggggctcggggagctcctcgcggcgtggccctccctcgccgacgagcccgcgccgtggtacaccccggcgcggggcgcggagccgctgaccccgctcatggtcgccgccgtgtacggctcggtgggctgcctcgacgcgctcctctcgccgccctacctcgtggaccccaaccgcgcctcggcgtcgtcgctctccaccccgctccacctcgccgccgcgggcgggtccgcctccgcccccgcggcggtctcccgcctcctcgccgccggcgccgacccggccctcctcgaccacctccagcgccgggcgtccgacctcgtcgcgctcccgcccaactcgctcccgctcaagaaccacctcctctccctcctcggcgcccgcaaggagtggcctcccgacccctccctccccgacatcaagaacggcgcctacgcctccgacgacttcaggatgtactcgttcaaggtgcgcgcgtgctcgcgggcctactcccatgactggacggagtgccccttcgtccaccccggcgagaacgcgcggcggcgcgacccgaggaagtaccactacagctgcgtgccgtgcccggagttcaagaagggggccgggtgcaggagaggggacatgtgcgagtacgcgcacggggtgttcgagagctggctccacccggcgcagtaccggacgcgcctctgcaaggacggcgtcggctgcgcccgccgcgtctgcttcttcgcccacacgcccgacgagctccgcccgctctacgtctccacgggctccgccgtgccgtcgccgcgcggggcgttggagatggcggcggcggcggcggcgatggggatggggctgtcgtcgccggggtcgtcgtcgttcacgccgccgctatcgccgtcggccggcgggggcgggggcgggggcgggggcagcggcggcggcggcgcgtggccgcagcagccgagcgtgccggcgctctgcctgcccgggagcgccgggaacctccacctgagccggctgcgcacgtcgctgagcgcgcgcgacatggccgtcgacgagctgctcgccgcggcggcggcggcggcggactacgacggcctcgtcgcctcccccgcctccatccggtccgcgagggggaaggcgcttgtgccgtcaaatctcgacgagctcttctccgctgagctcgccgccgccgcggcgtcgcgctcgccgcgctacgccgaccaaggcggcgccgcgttctccccgacccgcaaggccaccgtgctcaaccaattccagctgcagcagcagcatagcttgctctcgccgcgggcggccgcggtgacaccagagccggtctccccaatgagctcccgcctcctcgccgcgctggcgcagcgggagaagatgcagcagcagacgctgcggagcatgagctcacgggacctcggcaacgccgcgtcgctgctggtcggctcgccggtgagctcgagcatgtccaaatgggggttcccctccggcaacccggactggggcgccgacgacgaggagctcggccgcctcaagcgttgctcctcgttcgagctccggtccggagccgccaatggcaaccatgagcctgacctctcatgggtcaacaccctagtgaaggagccgacaccggagaagatgatgacgacgacatcggcaatggattccattggcatcttgggacagaacacaagccgtgatcacatcgtcggaggcgaggatgacactgccggagtcatcagcagctggcttgaacagctccagctcgatgagatggttgtctag

SEQ ID NO: 13 - protein, 619 aa, Oryza sativa
MGEPGGAEAAVSARLLELAADDNAAGLGELLAAWPSLADEPAPWYTPARGAEPLTPLMVAAVYGSVGCLDALLSPPYLVDPNRASASSLSTPLHLAAAGGSASAPAAVSRLLAAGADPALLDHLQRRASDLVALPPNSLPLKNHLLSLLGARKEWPPDPSLPDIKNGAYASDDFRMYSFKVRACSRAYSHDWTECPFVHPGENARRRDPRKYHYSCVPCPEFKKGAGCRRGDMCEYAHGVFESWLHPAQYRTRLCKDGVGCARRVCFFAHTPDELRPLYVSTGSAVPSPRGALEMAAAAAAMGMGLSSPGSSSFTPPLSPSAGGGGGGGGGSGGGGAWPQQPSVPALCLPGSAGNLHLSRLRTSLSARDMAVDELLAAAAAAADYDGLVASPASIRSARGKALVPSNLDELFSAELAAAAASRSPRYADQGGAAFSPTRKATVLNQFQLQQQHSLLSPRAAAVTPEPVSPMSSRLLAALAQREKMQQQTLRSMSSRDLGNAASLLVGSPVSSSMSKWGFPSGNPDWGADDEELGRLKRCSSFELRSGAANGNHEPDLSWVNTLVKEPTPEKMMTTTSAMDSIGILGQNTSRDHIVGGEDDTAGVISSWLEQLQLDEMVV

SEQ ID NO: 14 - DNA, 2106 bp, Medicago truncatula
atgaaaaatctaactgttcgtactgatgattctttttccagcttacttgaacatgcttctaacaatgattttgaagatttcaaggtagctctagatagtgatgcttcacttattaatgaagttggcttctggtatgtccgtcaaaagggatctaaccaaattgttcttgagcaccgaacccctttaatggtggctgcttcctatgggagtattgatattctaaagcttatactctcatatcccgaggctgatgttaatttctcctgtggaactgataaaagcactgctcttcactgtgctgcctcaagtggttcagttaatgctgttgatgctataaaattgcttttatcagctggtgctgatatcaattctgtggatgctaatgggaaacgccctgtggatgttatcgttgttcctattgttgttcctcataagctcgaaggtgttaaaacaattcttgaagaacttctctcagacagtgcttctgaaggatctgtggatgattgctctcttcccctgtctcttatttcatcgagtcctggttcatctgcccctttatcatctgctgaaaatggatctccatcctctcctgtggctcccaagtttacagatacagctgttaattctacatcagaaaagaaagagtatccagttgacccatctcttcctgacataaaaaacagcatgtatgccacagatgaattccgcatgtattcattcaaggttcgtccttgttctcgtgcatactctcatgattggactgagtgtccttttgtgcatcctggagagaatgctcgaaggagagaccctagaaagtttcactacagctgtgtgccatgccctgattttaggaaaggggcttgccgacgttcggatatgtgtgaatatgctcatggagtattcgagtgctggctacacccagctcagtatcggacaaggctgtgcaaagacggtatgggttgtaaccgaagggtgtgcttcttcgctcactcacctgaagagctgcgtccgctgtatgtgtccactggttctgctgttccttcaccccgatcagctgcttctactgctaatgtcatggacatggctgctgctatgagccttttccctggttcaccatcatcaatctctttgatgtctcaatcaccctttgcacagcctcctctatctccatctgcaaatggcaataatgcttggccacagcccaatgtgccagctcttcatttaccaggaagcattaatcaaactagtcgtttgagatcttctcttagtgcccgtgatatgccacacgacgacttcaacaatatgttgcaagactttgatgggcagcagcagatactaaatgacttgagctgtttctcacagccccgtcctggtgctatttcagttggtcgatctggccgccctaaaacactaactccctcaaatctggatgatcttttttgtgctgagattgcttcatctcctaggtattccgaccccgctgcggcttctgtattttccccaacacacaaatctgctgtcttcaaccagtttcaacagcttcaaagctccttatcacccatcaacacaaatgtcatgtctcctacaaacgtagagcatcccctgttccaccaggcttcatatggtctctcttctcctggaaggatgtcaccaagaagtatggaagccctatctccaatgagttctcggctgtcagcttttgctcagcgtgagaaacaacagcagcagcagcaacagctgcgtagcctcagctcaagagaactcggtgctaacaatcctctctcagctgttgggtcccctgttaactcctggtccaagtggggatcatcccctattggaaaagctgattggtcggtaaatccaaatgacttcggtcaaacacagagatcaacttcttttgagcatggaaacaatggagaagagcctgatgtaggttgggtccattcccttgtcaaggatcccacacctgagaagaaagagaagcttgcaggttccggcccaattccatccgttgaaaagaatcccaatcctcaagcggacggcattgatcactctgttttgggagcttggctcgagcaactgcagctggatcaacttgtagtctag

SEQ ID NO: 15 - protein, 701 aa, Medicago truncatula
MKNLTVRTDDSFSSLLEHASNNDFEDFKVALDSDASLINEVGFWYVRQKGSNQIVLEHRTPLMVAASYGSIDILKLILSYPEADVNFSCGTDKSTALHCAASSGSVNAVDAIKLLLSAGADINSVDANGKRPVDVIVVPIVVPHKLEGVKTILEELLSDSASEGSVDDCSLPLSLISSSPGSSAPLSSAENGSPSSPVAPKFTDTAVNSTSEKKEYPVDPSLPDIKNSMYATDEFRMYSFKVRPCSRAYSHDWTECPFVHPGENARRRDPRKFHYSCVPCPDFRKGACRRSDMCEYAHGVFECWLHPAQYRTRLCKDGMGCNRRVCFFAHSPEELRPLYVSTGSAVPSPRSAASTANVMDMAAAMSLFPGSPSSISLMSQSPFAQPPLSPSANGNNAWPQPNVPALHLPGSINQTSRLRSSLSARDMPHDDFNNMLQDFDGQQQILNDLSCFSQPRPGAISVGRSGRPKTLTPSNLDDLFCAEIASSPRYSDPAAASVFSPTHKSAVFNQFQQLQSSLSPINTNVMSPTNVEHPLFHQASYGLSSPGRMSPRSMEALSPMSSRLSAFAQREKQQQQQQQLRSLSSRELGANNPLSAVGSPVNSWSKWGSSPIGKADWSVNPNDFGQTQRSTSFEHGNNGEEPDVGWVHSLVKDPTPEKKEKLAGSGPIPSVEKNPNPQADGIDHSVLGAWLEQLQLDQLVV

SEQ ID NO: 16 - DNA, 2841 bp, Oryza sativa
atgaacggcacgccgatctccgcgtccgccgcggccggcgtcgacggagtcggcgcggcggtggcgctggcggccgcgaccaagaagagtgccgccgcggcggccgccgtcgccgagatggcgaaaaccctcaccgtcgacacggacgacgccttcgcggggctcctcgagctcgccgcggacgacgacgcggagggcctgcgccgcgcgctggagcgcgccccgcccgccgccgcggacgaggcgggcctctggtacggccgccgcaaggtcctcgagcaccgcacgccgctgatggtcgcggccacctatggcagcctcgcggtgcttcgcctgctgctgtccctcccgtccgtcgatgtcaatcgccgctgtggctccgacggcaccaccgccctccactgtgcggcgtctggtggctcgccgtcttgtgtggaggccgtcaagctgctgcttgctgctggggctgatgctgatgccacggatgcttccggatatcgtccagctgatgtgatctctgttcctccaaagatgtttgacgccaagattgccctccaagatcttcttggatgcccaaaggctgggcatggcgttctccgggtggtgacaagggccgcaaactctatgttgtcacctgtatcatcccctacagcagaagatgcacgatctccatcagctgctgtgatgatgacgacaaagtttgcagatcttccaagggttgtgacatcggaaaagaaagaatatccagtggatccgtcccttcccgatatcaagaacagcatctatgcttccgatgagttccgcatgtactcatttaagatcaggccatgctcgcgggcgtactcacatgattggactgagtgcccgtttgttcacccaggggagaacgcacggcgtcgggaccctcgcaagtatcactacagctgtgtgccatgccccgactttagaaagggagtttgccggcgtggtgacatgtgtgaatatgctcatggcgtgttcgagtgttggctccatccagcacagtaccgtactcgcctttgcaaggatggcacaagctgtaatcgccgtgtctgtttctttgcgcatacaactgatgagctccgaccactatatgtttccactggatctgcagtaccatccccaagagcctcggcaacagctacaatggagatggctgcagcaatgggcttgatgcctggttctccatcatcagtttcagcagtcatgtccccatttacaccaccaatgtccccttcaggcaatgggatgcccccttcattgggctggcagcagccaaatgttccgacactacaccttccaggcagcagccttcagtcgagccggctccgtacctcacttagtgcaagggatatgcctgctgatgattactccctgatgcaggatattgattcacagcttataaatgatttgtgctattcacgtattggttcatcaacaggaaaccacacgtctcggaccaagtccctaaatccgtcaaacttggatgatctcttctctgctgagatggtctcttccccgaggtatagtaatgctgatcagggtggtatgttttcaccatctcacaaggctgctttccttaatcagttccagcaacagcagcaggcacttctttcaccaatcaacacagtcttctccccgaagtctgtggacaaccagcagttgccttcacactcatctctgttgcaagcatcacttggtatatcctcccctggccgcatgtctcctcgatgtgttgaatctgggtcccctatgaactctcatcttgctgctgctcttgctcagcgtgagaagcaacagcagacaatgagaagtctcagttctcgtgatcttgggccgagtgctgcaagagcatcaggtgttgttggctcccctctaagctcatcatggtcaaagtggggatcaccttcagggacacctgactggggtgttaatggtgaagaattgggcaagcttcgccggtcatcatcgtttgagctgagatctggtggtgatgatccagatctctcttgggtacacacactggttaaggaatctccaccagagaagcaagtcactactgctgaatccataaactctgttggaccttcaccactgatgcctcccagtgtaagcaacggtgaaggtcctagtctgaatgccccgctggatgggcatgaccaagctgctgttattggagcattgcttgaacagatgcagcttgatcagcatattggtagtctagcaacataagcgctgaatgagcctggaaagtgcaaggagttattattcttagttaatgaatttggagtaatttttttcctgttcattaagatggtcagcaagcaaaaggatggatagctgatggtggtgattcagagattggttttctttactttattgaggtaaatcatatacattattgaggttccagtaggttgaaagattgaagtaccttgattggggtcgtttcaagaccgacccaggtagaatcgcaccccggcagcttcaattcatcggtcaaaaatatttccctgttttgttaattaaccccgttaaaaaagaagactcgtttggtgtttcggaattcttttctttaccttagcggtgtttattttgtttattatgatattgatacttgatgtactgatgggtataaggttggttaccaggcatgctatagtggtatatcaagtcccaaagtattctttttctccctttcaccatttgtcgaggatcatactatggccttgttttggtcagatcttgaggcctgtataatccttggatttgtaataatgtaatattgtcattgaacttacattgctattgttttgcaatcgc

SEQ ID NO: 17 - protein, 749 aa, Oryza sativa
MNGTPISASAAAGVDGVGAAVALAAATKKSAAAAAAVAEMAKTLTVDTDDAFAGLLELAADDDAEGLRRALERAPPAAADEAGLWYGRRKVLEHRTPLMVAATYGSLAVLRLLLSLPSVDVNRRCGSDGTTALHCAASGGSPSCVEAVKLLLAAGADADATDASGYRPADVISVPPKMFDAKIALQDLLGCPKAGHGVLRVVTRAANSMLSPVSSPTAEDARSPSAAVMMTTKFADLPRVVTSEKKEYPVDPSLPDIKNSIYASDEFRMYSFKIRPCSRAYSHDWTECPFVHPGENARRRDPRKYHYSCVPCPDFRKGVCRRGDMCEYAHGVFECWLHPAQYRTRLCKDGTSCNRRVCFFAHTTDELRPLYVSTGSAVPSPRASATATMEMAAAMGLMPGSPSSVSAVMSPFTPPMSPSGNGMPPSLGWQQPNVPTLHLPGSSLQSSRLRTSLSARDMPADDYSLMQDIDSQLINDLCYSRIGSSTGNHTSRTKSLNPSNLDDLFSAEMVSSPRYSNADQGGMFSPSHKAAFLNQFQQQQQALLSPINTVFSPKSVDNQQLPSHSSLLQASLGISSPGRMSPRCVESGSPMNSHLAAALAQREKQQQTMRSLSSRDLGPSAARASGVVGSPLSSSWSKWGSPSGTPDWGVNGEELGKLRRSSSFELRSGGDDPDLSWVHTLVKESPPEKQVTTAESINSVGPSPLMPPSVSNGEGPSLNAPLDGHDQAAVIGALLEQMQLDQHIGSLAT

SEQ ID NO: 18 - DNA, 2769 bp, Arabidopsis thaliana
acaccagttaccctctcatccgttttcgttttttttttctctctttcaaaaatctctcagctgaggttgatcgatcttcttcttcttcttcctcactctttagatttgttccttttgcattttacacttttggatctgaaaatgtggttctctgtttcgcccgttaccgtttagattcagttctgtttttttcttacccgatcgcttgattcggactgtgatctttgatcttttttcttctccagtgccgtgaaggatgtgtggtcttgctaagaagctggatatagaggatactttgacatcactgtcagaccaagagaatgaatctttggccaaacccatgaatgatgctgctgaatgggaacattcgttttctgccttgcttgagtttgctgcagacaacgatgtggaggggtttaggcggcaactctctgatgtgtcttgtatcaaccagatgggtctttggtacagacggcagaggtttgttagaagaatggttcttgagcaaagaaccccgctgatggttgcttcgttatatgggagtttagatgttgtgaagtttattctttctttcccggaagcggagttgaatctgtcttgtggtcctgataaaagtactgctcttcattgcgctgcttctggtgcttctgtgaattccttggatgttgtcaagttgcttttgagtgtaggagcagatcctaatatccctgatgctcatggaaatcgtcctgttgatgttcttgttgtgtctccacacgctcctggtttgagaaccatccttgaagagatcttgaagaaagacgagattatatctgaagatctgcatgcctcgtcatctagcttgggatcaagtttccggtctctctcatcatcccctgataatggttcctcgttactctccttagattcagtatcctctccgactaagccacacggtactgatgtaactttcgcatcagagaagaaagagtacccaattgatccatcattgcctgatatcaaaagcgggatttattcaaccgatgagtttcgtatgttctcgttcaagatccgcccatgttctcgagcatattcccatgactggactgaatgtccatttgcacacccaggtgagaatgcaaggagaagagacccgaggaagtttcactatacgtgtgttccatgcccggattttaagaaaggatcctgtaagcaaggtgatatgtgtgaatatgctcatggggtttttgaatgctggctacaccctgctcagtacagaacacgattgtgcaaggacggaatgggttgcaaccgaagggtttgcttctttgctcacgcaaatgaggagttgcgtcccttgtacccttccacaggatctggattgccatctcctcgggcttcgtctgctgtttccgcctctactatggacatggcgtcagttttgaacatgttaccaggctcaccatctgctgctcaacattcgttcaccccaccaatatctccttctggaaatggtagtatgccccattcatcgatgggttggcctcagcagaacataccggcgttgaatcttcctggaagcaatatccagttgagtcgtctgagatcttctcttaacgctagagatattccttctgagcagcttagcatgctgcatgagtttgaaatgcaacgtcagcttgctggcgatatgcacagtccacgctttatgaatcattccgctcgtcctaagacactgaacccttcaaatctggaggaactcttctcagctgaggttgcatctcctcgtttctctgatcaacttgctgtttcatctgttctatcgccttcccacaagtccgcgcttcttaatcagctgcagaataataagcagagcatgctttctcctatcaagacaaatctaatgtcttctccaaagaatgtggagcaacattctcttctgcagcaagcctcgtcaccccgaggcggagagcctatttccccaatgaatgctcgaatgaaacagcagctacattcacgcagcctaagctcccgtgattttggatctagtctgccccgtgatttaatgccgactgattctggttcgccattaagtccatggtcaagttgggaccagacccatggaagcaaggtggattggtcagtccaatcagatgagttaggtcggttgagaaaatctcattccttggctaataacccaaacagggaagcagatgtttcatgggctcagcagatgttaaaagactcttcatcacctaggaacggaaaccgtgttgtgaacatgaatggtgcaaggccattgactcaaggtggttcgagtgtgaatcctcacaacagtgacactcgtgagagcgacattcttgatgcgtggcttgaacagctgcacctagatcgctgagcctcagctgcgagagagaggttcacatttctgtgaagctgtgaaactgatgattcgtttatttattattcaagaaagcaaacggaaacaaaagcaaactccgggtaagcttttttcgattctaataaccctaaaaggctcagttttttcaggcttctttctgaaatttctttactttcttatttttatcacctcattaaattaattattgtatcatctctgttgtaacaatggccaaagtgcgcctctattacttcccggatttctgatttacattttttgtatcctctcagtttgtcaattgtttctaatatctccttcatatttgtcaaagaacactgtatgagaaataataacatattgtttcagctaataagattcattcatttcct

SEQ ID NO: 19 - protein, 706 aa, Arabidopsis thaliana
MCGLAKKLDIEDTLTSLSDQENESLAKPMNDAAEWEHSFSALLEFAADNDVEGFRRQLSDVSCINQMGLWYRRQRFVRRMVLEQRTPLMVASLYGSLDVVKFILSFPEAELNLSCGPDKSTALHCAASGASVNSLDVVKLLLSVGADPNIPDAHGNRPVDVLVVSPHAPGLRTILEEILKKDEIISEDLHASSSSLGSSFRSLSSSPDNGSSLLSLDSVSSPTKPHGTDVTFASEKKEYPIDPSLPDIKSGIYSTDEFRMFSFKIRPCSRAYSHDWTECPFAHPGENARRRDPRKFHYTCVPCPDFKKGSCKQGDMCEYAHGVFECWLHPAQYRTRLCKDGMGCNRRVCFFAHANEELRPLYPSTGSGLPSPRASSAVSASTMDMASVLNMLPGSPSAAQHSFTPPISPSGNGSMPHSSMGWPQQNIPALNLPGSNIQLSRLRSSLNARDIPSEQLSMLHEFEMQRQLAGDMHSPRFMNHSARPKTLNPSNLEELFSAEVASPRFSDQLAVSSVLSPSHKSALLNQLQNNKQSMLSPIKTNLMSSPKNVEQHSLLQQASSPRGGEPISPMNARMKQQLHSRSLSSRDFGSSLPRDLMPTDSGSPLSPWSSWDQTHGSKVDWSVQSDELGRLRKSHSLANNPNREADVSWAQQMLKDSSSPRNGNRVVNMNGARPLTQGGSSVNPHNSDTRESDILDAWLEQLHLDR

SEQ ID NO: 20 - DNA, 2674 bp, Oryza sativa
tgcgagtcctcctcctcttctcgtcgccgtgctactctcgctttctctctctctctctctcacttgttccccaaggcgagaagcagccgccgccggcgagcgtcgcgggggaggggagggaagggagggaggagcggtggatccgggcttgattggattgggtcggattcgattttggatcaaccccggagggcgggagcggttgctacagatgcgttgagctttggttaatctatccggcgagagataatgggcgagcttgctgatctcgttgtcgtgccgtcgcagccgccgctcgccggcggccggcgggacaggctggcggcgctgctggagctcgcggcggcggatgatgttgatgggctcaggggggcgctcgcggagggaggcgaggaggcggcggagttggctgatggggtcgggctgtggtatggtcggagcaaggcgtacgaggcgcgcacgccgctgatggtggcggcgacgtacggcagcgccggggtggtctcgctgctggtgggcctcggcggttgcgtcgacgtcaaccgtcgccctggagccgacggcgccaccgcgctccactgcgccgcctccggtggctcgcgcaacgccgtcgctgttgtcaagctgcttttggccgctggcgccgatccggccacccccgattccgccggccgcttccccgccgacgtcatcctagctcctccggcttcgccagatgcccttggcgatctcgaggtgctcctcggccgccgccgagcactcgccgtggcgacctcggtggcttcaggttcgtcatcccctccgctctcgtcctcaccagatgagggcaacaggtcgccctcgtcgcgttcgtcgtcgctgtctcccatcactgtggatcgtgggaagaaggagtatccggtggatccaactctgccggacatcaagagcagcgtgtatgcttcggatgagttccgcatgtttgcgttcaaggtccggccctgctcccgtgcctactcacacgactggactgagtgcccgtttgtgcaccccggcgagaacgcccgccgccgtgatccccgcaagcacccatacactgctgtgccttgccccaactttcgccggcctggtggctgccctagcggcgatagctgtgagttctcgcatggcgtgtttgagagctggctacacccatcacagtatcgcacaaggctctgcaaggagggagcagcttgcgcccgtcgcatttgcttctttgcccatgatgaggatgagctccgccatgtgcctcacaacagtggtgccggcctgctgtctccccgcgcttcttcatccattgatatgactgctgcagctgcgctcgggcttcttccaggttctcctaccagacactttgcaccgccgcctgtgtcaccatctgctgggagcaatggaggagctgctgctgcgcattggctccaaggcagtaggctgcgttcttctttcaatgcaagggatgctgctgttgatgaccttggcatgctcctcgaatgggaatcacaataccttggggcactctgcctgccacccagcagccgcccccaaccacgcctttcagctggtctgagtatcaggccaacaattgctccatccaatcttgaagacatgtatgcttcagacatggcaatgtctccgaggttccctaatgaccaaggtcactcagtctactcaccagcccacaaatcagccctcctcaacaagcttcatcaacagaagggcctcttatcacctgttaacaccaacagaatgtactccccaagggctcttgatccgtcatctttggcacattctccatttggtggcatgtctccccggtccccccgtaccatggaacctacatcacccctaagtgctcgtgtaggagcccctgccacacagcggccttctgttggttcaccacggaattccagtgcttggggcaccgtggggtccccgatgggtaaggttgactggggtgtcgatagcgaggagctagtccgcttgagacgccctgcacaaccagggtttggagaagatgagacagatgtatcatgggtgcagtcactggtaagcaatgctgagcttaatggcaagaggggcgaagtacaaggcatgcctggtacttctgcattgatgaacaggcctgacctgaacaatcagggtgacttgttggaccagacggtgatcggtgcttggcttgagcagatgcacctggatcagaagtgatttccaagggaagccatgaagtcccaaagtggatgaagcctttattttgccaaggttatttaccaaagaatagttgttggtcctagtaaataataatttattctttttaattcttgaaatttttggtgggcaaagtcagagatggtggtcaagttcaacaaaacatttggtcacagattggtagctgaaatcagttccagagattggtaaacaacctcattacttggggtcctaactagtattcttttgattagctcagatgagtctttattttagtgggttaaaattcatatgttccccatggttattatgtccatgatctcttcctaacaaaagagagattataattgtccatttttcatttatcaatgaatgattttgttaaaacaatgtaagttacattcttaattttttctctgttcaatggaattaccttccttggttagtcctc

SEQ ID NO: 21 - protein, 657 aa, Oryza sativa
MGELADLVVVPSQPPLAGGRRDRLAALLELAAADDVDGLRGALAEGGEEAAELADGVGLWYGRSKAYEARTPLMVAATYGSAGVVSLLVGLGGCVDVNRRPGADGATALHCAASGGSRNAVAVVKLLLAAGADPATPDSAGRFPADVILAPPASPDALGDLEVLLGRRRALAVATSVASGSSSPPLSSSPDEGNRSPSSRSSSLSPITVDRGKKEYPVDPTLPDIKSSVYASDEFRMFAFKVRPCSRAYSHDWTECPFVHPGENARRRDPRKHPYTAVPCPNFRRPGGCPSGDSCEFSHGVFESWLHPSQYRTRLCKEGAACARRICFFAHDEDELRHVPHNSGAGLLSPRASSSIDMTAAAALGLLPGSPTRHFAPPPVSPSAGSNGGAAAAHWLQGSRLRSSFNARDAAVDDLGMLLEWESQYLGALCLPPSSRPQPRLSAGLSIRPTIAPSNLEDMYASDMAMSPRFPNDQGHSVYSPAHKSALLNKLHQQKGLLSPVNTNRMYSPRALDPSSLAHSPFGGMSPRSPRTMEPTSPLSARVGAPATQRPSVGSPRNSSAWGTVGSPMGKVDWGVDSEELVRLRRPAQPGFGEDETDVSWVQSLVSNAELNGKRGEVQGMPGTSALMNRPDLNNQGDLLDQTVIGAWLEQMHLDQK

SEQ ID NO: 22 - DNA, 2223 bp, Arabidopsis thaliana
ttcttcaaaaaccccaaccacttcttctccccaaaaacctccaaagtttcaatctttacttctctctttttctccaagttatcttcttttctaggaagagatatgtgcggtgcaaagagcaacctttgctcatctaaaaccctaacagaagtcgaattcatgaggcagaaatcagaagacggagcttccgccacgtgtctcctcgaattcgccgcctgtgatgatctttcatcgtttaagagagagatcgaagagaatccatcggtggagattgatgagtcagggttttggtattgcagacgggtcgggtctaagaagatgggttttgaagaaagaacaccacttatggttgctgctatgtatggaagcatggaagtgttgaattacataattgccacaggaagatccgatgtgaacagagtttgcagtgacgagaaagtcactgctcttcactgtgcagtttctggctgttctgtttctatcgttgagatcatcaagatcttgcttgatgcttctgcttcacctaattgtgttgacgctaatgggaacaaaccggttgatttgttggctaaagattctcggtttgttcctaaccagagtagaaaggcggttgaggttttactgaccgggattcatggttcggttatggaagaagaggaggaggaactgaagagtgttgtgactaagtatccagctgatgcatcacttcctgatattaacgaaggtgtttatggaactgatgattttaggatgtttagctttaaggttaagccatgttctagggcttattcacatgattggactgaatgtccttttgttcatcctggtgagaatgcaaggaggagagatcctaggaagtatccttacacttgtgtgccttgtcccgagtttcgtaaagggtcttgtcctaaaggagattcgtgtgagtacgcgcacggtgttttcgagtcttggcttcacccggcgcagtataggacacggctttgcaaagatgagactggttgtgctaggagagtttgtttctttgctcatagacgggatgagttaagaccggttaatgcttctactggttctgcaatggtttcaccaaggtcgtctaatcagtctcctgagatgtctgttatgtctcctttgacgctgggatcatcgccaatgaactctcctatggctaatggtgttcctttgtctccaagaaatggtggtttatggcagaacagagttaatagccttacaccaccaccgttgcagcttaatggtagcagattgaagtcgactttgagtgctagagatatggatatggagatggaacttaggtttcgcggtttggataaccggagacttggtgatctcaagccatccaacctcgaagagactttcggatcatatgactcagcttctgtgatgcaacttcaatcaccaagcaggcattctcagatgaaccactatccgtcttcacctgtgaggcagcctcctcctcatggattcgaatcttcagcagccatggcagctgcagtgatgaatgcaagatcctcagcgtttgcgaaacgcagcttgagtttcaaaccagctccagtagcttctaatgtctccgattggggatcaccaaatgggaagcttgagtggggaatgcaaagagatgagctgaacaagttgaggagaagtgcctccttcggcattcatggaaacaacaacaacagtgtgtcacgccctgctagagactacagtgacgagccagatgtgtcgtgggtgaactcactggtgaaagagaatgcaccagagagagtgaatgagagggttgggaatacggtgaatggtgcagcgagtagagacaagtttaagctgccgtcgtgggcagagcaaatgtatatagaccatgagcagcagattgtggcataagaagcagaaagaaagatgtgggatttatattgcttttgtcttctgggcctctctacacagaatctaacaaatctggcaataattctttgatttgtgtttgacccatagtttggttactagtatatgtttttttatgttctttttttctttgtcattctcttgtccttcgtgacactatgtaatgattaaaagcaaataattgatgcatgagttcaaatgttctttgaaggatccatcttattagctttgtaattgttgtgatatcttaatcttattggttacgtatttcaagtgctttagaaaaaatgggcctaagagattttgggg

SEQ ID NO: 23 - protein, 597 aa, Arabidopsis thaliana
MCGAKSNLCSSKTLTEVEFMRQKSEDGASATCLLEFAACDDLSSFKREIEENPSVEIDESGFWYCRRVGSKKMGFEERTPLMVAAMYGSMEVLNYIIATGRSDVNRVCSDEKVTALHCAVSGCSVSIVEIIKILLDASASPNCVDANGNKPVDLLAKDSRFVPNQSRKAVEVLLTGIHGSVMEEEEEELKSVVTKYPADASLPDINEGVYGTDDFRMFSFKVKPCSRAYSHDWTECPFVHPGENARRRDPRKYPYTCVPCPEFRKGSCPKGDSCEYAHGVFESWLHPAQYRTRLCKDETGCARRVCFFAHRRDELRPVNASTGSAMVSPRSSNQSPEMSVMSPLTLGSSPMNSPMANGVPLSPRNGGLWQNRVNSLTPPPLQLNGSRLKSTLSARDMDMEMELRFRGLDNRRLGDLKPSNLEETFGSYDSASVMQLQSPSRHSQMNHYPSSPVRQPPPHGFESSAAMAAAVMNARSSAFAKRSLSFKPAPVASNVSDWGSPNGKLEWGMQRDELNKLRRSASFGIHGNNNNSVSRPARDYSDEPDVSWVNSLVKENAPERVNERVGNTVNGAASRDKFKLPSWAEQMYIDHEQQIVA

SEQ ID NO: 24 - DNA, 1761 bp, Arabidopsis thaliana
atggaaaaagatagtattatgtgcagtggaccaaagagcaatctctgctcttcaagaaccttaacagaaatcgaatcaaggcaaaaggaagaagaaacaatgcttctcctcgaattcgctgcttgtgatgatcttgactcgttcaagagagaggttgaagagaaagggcttgatttggatgagtcagggttatggtattgcagacgtgtcggttctaagaagatgggtcttgaagaaagaacacctttaatggttgcagctatgtatggaagcataaaggttttgactttcatcgtttccactggaaaatctgatgtgaacagagcttgtggtgaagagagagttactccgcttcactgtgctgttgctggctgttctgtgaatatgattgaagtcatcaatgtcttgcttgatgcttctgctttggttaactctgttgatgctaatgggaatcaacctttggatgtgtttgttcgagtttcgaggtttgtggctagtccgaggaggaaagcggttgagttgttgctgagaggaggaggtgttggaggattgatcgatgaggcggttgaagaagagatcaagattgtctctaagtatccagctgatgcttctttaccggatataaacgaaggggtttatggaagtgatgagtttaggatgtatagctttaaggttaagccatgttctagggcttattctcatgattggaccgagtgtgcttttgttcatccgggagaaaatgcgaggaggagagatccgaggaagtatccttacacttgtgtcccctgtcccgagttccgtaaaggatcatgcccgaaaggagattcttgcgagtatgctcacggggttttcgagtcgtggcttcaccccgcgcagtataaaacccggctttgtaaagatgaaacgggttgtgcaaggaaagtttgtttctttgctcataaacgcgaagagatgagacctgttaatgcttcaactggctctgccgtggctcagtctccgtttagcagcttggagatgatgccagggttgtctcctcttgcttattcttcaggagtttcgactcctccggtttctccaatggctaatggtgttccttcctctccaagaaacggcggatcatggcagaacagagtcaatacccttactccaccggctttgcagctcaatggtggaagcagattgaagtccacactgagcgctagagatatcgatatggagatggagatggaattgagactccgcggttttggcaacaatgtggaagagacgttcgggtcttatgtttcctctccaagtaggaattctcaaatgggtcaaaacatgaaccaacattatccatcttccccggtgagacaaccgccatctcaacacgggttcgaatcttcagcagctgcagcggttgcagtgatgaaagcgagatcaaccgcctttgcgaaacgtagcttgagcttcaaaccagctactcaagcagcaccacagtcgaatctctcggattggggatctccaaacgggaagctggaatggggaatgaaaggagaagagctgaataagatgagaagaagtgtttcctttggaatccatggaaacaacaacaataacgcagctagagactacagggacgagccagatgtgtcatgggttaactctttagttaaagacagtactgtggtgtctgagagaagctttggaatgaatgagagggttcggataatgtcgtgggctgagcaaatgtacagagagaaggagcagactgtggtgtaa

SEQ ID NO: 25 - protein, 586 aa, Arabidopsis thaliana
MEKDSIMCSGPKSNLCSSRTLTEIESRQKEEETMLLLEFAACDDLDSFKREVEEKGLDLDESGLWYCRRVGSKKMGLEERTPLMVAAMYGSIKVLTFIVSTGKSDVNRACGEERVTPLHCAVAGCSVNMIEVINVLLDASALVNSVDANGNQPLDVFVRVSRFVASPRRKAVELLLRGGGVGGLIDEAVEEEIKIVSKYPADASLPDINEGVYGSDEFRMYSFKVKPCSRAYSHDWTECAFVHPGENARRRDPRKYPYTCVPCPEFRKGSCPKGDSCEYAHGVFESWLHPAQYKTRLCKDETGCARKVCFFAHKREEMRPVNASTGSAVAQSPFSSLEMMPGLSPLAYSSGVSTPPVSPMANGVPSSPRNGGSWQNRVNTLTPPALQLNGGSRLKSTLSARDIDMEMEMELRLRGFGNNVEETFGSYVSSPSRNSQMGQNMNQHYPSSPVRQPPSQHGFESSAAAAVAVMKARSTAFAKRSLSFKPATQAAPQSNLSDWGSPNGKLEWGMKGEELNKMRRSVSFGIHGNNNNNAARDYRDEPDVSWVNSLVKDSTVVSERSFGMNERVRIMSWAEQMYREKEQTVV

SEQ ID NO: 26 - DNA, 2709 bp, Eucalyptus grandis
cttctgaaagctttttgacttaagacgagagagaaggagagaaggtccccctcctcgtcctcgtccccccgtggattttgaagaagaaaagtcgcaccttccttctcctttcccactcctccctctgctcgaagcttttctcttccgcagaattacataaaaacctcgactttgcgcatcattccgattcacctcacaccttcactttcccactcgaggtctcccccctcttttcctagctctttccctttccctccctctctctcgagaatcgccgcatttggaggagctccaatctgctttgctttgctttgctctcttcttgctcggttccccctcataaggagtcgattatgtgcaacggttcttcgaagggtaaacttttcccctcgagtatgggcatggagggcgaattccacaacaaggatggcgaagcaccccgtaaatgctctgccttgcttgaattggcagcctcggacgatctctcgtcgttcaaaagtgaagtggaagagaagggctgcgacgttgatgaggccagcttttggtatggtaggagaatcgggtcgaagaagatgggttttgaagagaggactccattgatgatctctgctttgtttggaagcaccaaggtcttgaaatacataatcgagaccgccagagctgatgtcaacaggtcttgtgggtccgacaaggtggccgccctccattgcgcagccgcgggtgggtccagttcttcacttgaaattgtgaagctcttgattgaggcctcagcggatattaattctgtagatggcaatggaaataggcccatcgacgtgcttgccccggcagggaagtctcgctgcaattccagaaataagtttgttagatcgttgctgaaaggtgaaaactatgtcgtggaaggtgaccaatcctttgacatagaaggagaggagaagctagtcgctcttccaaaggagggaggcgagaagaaagagtatcctgttgatgtctctctacctgacataaacaatgggttctacagtaccgatgagttccggatgtatgctttcaaggtgaagccttgctcgagggcttactcccacgactggaccgagtgcccgtttgtgcaccctggggagaacgcgaggaggagggacccacgcaagtacccttacagctgtgtcccttgtcctgagtttcgcaagggttcgtgcgtaaggggggatgcttgtgagtatgctcatggagtctttgagtcgtggcttcacccagcgcaataccgaacccggctgtgcaaggatgaaactggttgtactcgcaaagtttgcttctttgctcacaagtccgaagaattgcgtcccgtgtatgcttccacaggttctgctatgccctcacccaagtccttttcagctaatgccctagacatgacaaccctgagccccttatcccttaattcaccatctctgcctttgcctgctacttccacgccccccatgtcacctttggctgcctcatcttcacccaagggcatgaacttgtggcataacaaaattaacctgaccccaccaagcctgcagcttcctggcagccggctgaagacggctatgagtgcgcgggacttcgattttgagttggaatttcttgggctggaaaagcaagcttctcagcggcagcaactgatagaagagatttctcgtctctcatcgccctctcatatgtggaactcggaatttggcagaaccgcagagctgaagcccactaaccttgatgatgcgtttggatctcttgacacttctcttttgtctccgttgcaggggtcgtcgatgaaaacatcgactcctacccagttgcaatcccccacagggcttaaaatttcgaatttgaaccaactccgtgcgagctacccgtctagcagcttgtcgtcctctcctgtgaggaagacctcttcttttgggttcgactcatccagtgcagttgctgcagcagtcatgaactcacggtctgctgctatgacgaagcggagccagagcttcattgaccgtggagcagtgggtcaacggtctggactcattggacctgctaattctgctcctaggatgtccaacctttcggactggggctcgcctgatgggaagttggattggggtgttcaaggggacgagctcaacaagcttaggaagtccgcttccttcggctttagaaacaacagtatggcgaacccaaacaacgtggcgtctcccagtgctgatgagccggacgtgtcgtgggttggttcattggtgaaggatgtggctccgcccgaagggtatccacagtatctgtacatagaacaggagcagatggtggcataactaaagcgaagagcaccacacgaactctctcctgatggcttaagatgacttgtttgacattctttatattcttacaaacagcgcgttcttaggagttagctggaggaaagaaggaaacggtattgagtttgagattcaggctcttagctggacagcgaaaatttggggaaggaagagaatttggtttcttgcccaacttagataatgatgcttttgaaggcttaaaagaaagatgaaggcaaacattcttttgttagtattgtattattgttttaatttttcatcccctctgtcggggtgtggtgggtgtcgatgtttctttcatcagtaaaatatataatgaggtttactcatctattttctactaaaaaaaaaa

SEQ ID NO: 27 - protein, 659 aa, Eucalyptus grandis
MCNGSSKGKLFPSSMGMEGEFHNKDGEAPRKCSALLELAASDDLSSFKSEVEEKGCDVDEASFWYGRRIGSKKMGFEERTPLMISALFGSTKVLKYIIETARADVNRSCGSDKVAALHCAAAGGSSSSLEIVKLLIEASADINSVDGNGNRPIDVLAPAGKSRCNSRNKFVRSLLKGENYVVEGDQSFDIEGEEKLVALPKEGGEKKEYPVDVSLPDINNGFYSTDEFRMYAFKVKPCSRAYSHDWTECPFVHPGENARRRDPRKYPYSCVPCPEFRKGSCVRGDACEYAHGVFESWLHPAQYRTRLCKDETGCTRKVCFFAHKSEELRPVYASTGSAMPSPKSFSANALDMTTLSPLSLNSPSLPLPATSTPPMSPLAASSSPKGMNLWHNKINLTPPSLQLPGSRLKTAMSARDFDFELEFLGLEKQASQRQQLIEEISRLSSPSHMWNSEFGRTAELKPTNLDDAFGSLDTSLLSPLQGSSMKTSTPTQLQSPTGLKISNLNQLRASYPSSSLSSSPVRKTSSFGFDSSSAVAAAVMNSRSAAMTKRSQSFIDRGAVGQRSGLIGPANSAPRMSNLSDWGSPDGKLDWGVQGDELNKLRKSASFGFRNNSMANPNNVASPSADEPDVSWVGSLVKDVAPPEGYPQYLYIEQEQMVA

SEQ ID NO: 28 - DNA, 2518 bp, Eucalyptus grandis
tctccttcgagtttctttcttcactagaattcgctcccgagtctgttgttgctcgtgtagttttgcttactccgtccttcgtttagctcgctgaccagcgcggagctaggagcggtcgctaaaggattactcgtacaaaacgtaaactcagctctgccaattttcccatggagggggaatcttacttcgagaaagatgaaaaatattctaattgctcaatcttgctcgaattatctgcttcggacgatctcccagcttttgaaaggaaagcgaaagagaagggctgtaacattgatggtgctagcttctggtacggtagaagaattggctcaaggaagatgggtcttgaagagaggactcctctcatggtggcttccttgtttggaagctctagggttgtgaagtacattctcgaatctggcaaagtcgatgtaaatagggcttgtggttcggacaaggtcactgcccttcactgtgctgttgccagtggctctgcttctgcggtggaggttgtcaagctcttgcttcacgcatctgccgatgctaattgcattgatggcaatggaaagaagccaattgatgtgatagcccttccattaaagtcacgcggcgattcaaggaggaagctgatggagctgttgctgaaaggcgataattctgatggggaatttgaatcccacgaggagaagccgattgccgcaccgcaagcatccaaagagggaagcgaaaagaaagagtatcaatttcctgttgatatctctctgcctgacataaatgttgggatttacagtactgatgagttcagaatgtatgctttcaaagtaaagccttgctcgcgggcatactcccatgactggacagagtgcccatttgttcatcctggcgagaatgcgaggaggcgggaccctcgcaagtacccctacagctgcgtcccttgccctgaatttcggaagggatcttgccaaaagggtgactcctgtgagtacgcgcacggcgtatttgagtcgtggcttcatcctgcacagtatagaacaagactgtgcaaggatgagactggatgtgctcgcaaagtttgtttctttgctcacaagcccgaagaattaaggcctgtctatgcttcgacgggatcagctatgccttccccaaaatcctactcatcaagtgggctggacatgtccacattgagtcctctctcaatcagttctccgtcagcatcgttgcctgttacttcaacagcacccatgtctcctcttgcagcctcgtcatctccgatgtctgtgaacatgtggcagagcaaggctaacaagctctccccgccaatgctgcagctctcaggtagtaggctgaagactgctttgagtgctagggacttggacctggagatggaattgcgtggtctagagagtcagatggccactcaacagcatcagttgatggaagagatatctcgtctctcctcaccatcatcctgctttagtagtaggattggggaagtgaaacccactaacctcgatgacgtttttgggtctccggatcctgctttgctgcctcaattgcaggggctgtcaagaccttcaacaccaagccagttgcaatctccaactgggcttcagatgcgccagaatgcaacccagtttcgtggggcgtaccagagcaatgcaaatgcattgtcatctccagcaatgaagcaggcaccttcttatgggtttgactcatctagtgcagttgcagcagcggtgatgaattcgaggtcagccgcttttgcgaagcggagtcagagttttatcgacaggggaatggcgtgccctggaattgccaattcttcccctatgatgtcttcagctatgtcgagctggagctcacctcatgggaaattggattggggcgtccaaggagatgagttgaataggctgaggaaagctgcttcctttaagatgagaagcagcaccggagcaggtgctaatactgtctcggcagcagccatggctgatgagccagatatttcttgggtcagttcattggttaaggacgtgccttctgcggaggacgcgatgttcgctgcagagaaaggacagcgcacttatgggaaagacatccgcgaaaggattaccccatgggtggagcagctgtacagagaagtgccacggatggcgatgtaagattgccactgcaagtcggatgccttagtatgctgactaattgatattctttgcatttgttttgaggcatttggtagccattagatacgagaaaaggccaagcagcaggtggtgtcttggcaaggaataggatgcacatagtctgttatcgagtagaatagacttgggaacaatggttatagccaaatgttaaaagttatgatattcttttccaattctttctcttcctcatagtaggtttctcaccaagtcttttagtgagagcctgcgggatgtactatatgtttcccttatgtaacgtctcttcgttgaaagaaatggctttataatataaagcatcaagttttttaaaaaaaaaa

SEQ ID NO: 29 - protein, 663 aa, Eucalyptus grandis
MEGESYFEKDEKYSNCSILLELSASDDLPAFERKAKEKGCNIDGASFWYGRRIGSRKMGLEERTPLMVASLFGSSRVVKYILESGKVDVNRACGSDKVTALHCAVASGSASAVEVVKLLLHASADANCIDGNGKKPIDVIALPLKSRGDSRRKLMELLLKGDNSDGEFESHEEKPIAAPQASKEGSEKKEYQFPVDISLPDINVGIYSTDEFRMYAFKVKPCSRAYSHDWTECPFVHPGENARRRDPRKYPYSCVPCPEFRKGSCQKGDSCEYAHGVFESWLHPAQYRTRLCKDETGCARKVCFFAHKPEELRPVYASTGSAMPSPKSYSSSGLDMSTLSPLSISSPSASLPVTSTAPMSPLAASSSPMSVNMWQSKANKLSPPMLQLSGSRLKTALSARDLDLEMELRGLESQMATQQHQLMEEISRLSSPSSCFSSRIGEVKPTNLDDVFGSPDPALLPQLQGLSRPSTPSQLQSPTGLQMRQNATQFRGAYQSNANALSSPAMKQAPSYGFDSSSAVAAAVMNSRSAAFAKRSQSFIDRGMACPGIANSSPMMSSAMSSWSSPHGKLDWGVQGDELNRLRKAASFKMRSSTGAGANTVSAAAMADEPDISWVSSLVKDVPSAEDAMFAAEKGQRTYGKDIRERITPWVEQLYREVPRMAM

SEQ ID NO: 30 - DNA, 2001 bp, Triticum aestivum
  misc_feature (481)..(530): n is a, c, g, or t
cgaattccggtcgacgatttctcgatttccttctctataacacaacgctctcttctcttgcaaccaaagtacttgttccagtgtctactctactcaaaaaggatttgggacatcatgtgcagtgattcgaaaagtaaactttcttccccaaccctcgtcgtcatggagaatagtaacattcagaagcagaatctggatggtctctacaactcggttttgcttgaattgtctgcatctgatgattatgaagctttcaaaagagaggtggaggaaaaaggcttagatgtgaacgaggcaggcttttggtacggtagaagaattgggtcaaagaagatgggatctgaaacgaggacccctctgatgattgcttctttgtttggaagcgccaaggtgctcaattatattcttcttcagaaaggaggaggtgttgatgtgaacagggtctgtggttctgatagggccactgctctccattgtgctnnnnnnnnnnnnnnnnnnnnnnnnnnnnnnnnnnnnnnnnnnnnnnnnnntcccgggtcgcgatttcgtaggagattcacagagagaaaagaagcaattagtgataataagaaagaataccctgttgatatatcactgccagacataaacaacggtgtatatggaacagatgattttaggatgtacaacttcaaggtgaagccttgctcaagggcttactcccatgactggaccgagtgtccattcgttcacccaggggagaacgctaggaggagagacccacggaaatacccttacagctgtgttccttgccctgagttccgcaaagggacctgccagaagggtgattcctgtgagtatgctcatggtgtttttgagtcctggctgcatcctgcccaataccggacaaggctttgcaaggatgagactggctgcgctagaaaagtctgcttctttgcccacaaacctgaagagctacgccctgtgtatgcttccactgggtcggctatgccatcaccaaaatcatattcagctagtggacttgacatgacagcgatgagtccattggctctaagttccacatctttgcctaatgcccccccgtttccagcctcaccctatcgtgcgccctcgttcttctctcagagtgaagctgtgcagaacaaaataaaccttactccaccatcgttgcagctccctggtagccgactgaaggctgctttgagtgccagggatctggagatggagatggaactgctcggtctagaaagccctgctcgccaacaacagcagcagcagcaacaattgatcgaagagattgccaggatctcttccccatctttccggagcaaggaattcaataggattgttgatttgaatcctactaaccttgatgacctgttagcatctgctgacccttctgtattttctcaactacatggactttctgtgcaaccttcaacacccacacaaagtgggcttcagatgcgccaaaacatgaaccacctccgtgcgagttatccatccaacatcccttcctctcctgtgaggaagccctcagcttttgggtttgactcatcagctgctgtggcaactgcagtgatgaattctaggtctgctgccttcgcaaagcgaagccaaagtttcattgatcgtggagctgcaacccaccatcttgggctgtcttcagcttccaactcttcttgcagggtatcctctaccctttcagattggagttcccctaccgggaaactggattggggtgtaaacggagacaagctgaacaagctgaggaaatctacttcctttggattcagaaacagtggggtaactgcatcccccatagcacagcctgaatttggtgctgagccggatgtctcatgggttcattcattggttaaagatgttccctccgagaggtctgagatatttggtgctgagaagcaacaatatgatctcagtaaagagatgcttccaccatggatggagcagctgtatatagagcaggagcagatggtagca

SEQ ID NO: 31 - protein, 667 aa, Triticum aestivum
  UNSURE (161)..(177): Xaa can be any naturally occurring amino acid
RIPVDDFSISFSITQRSLLLQPKYLFQCLLYSKRIWDIMCSDSKSKLSSPTLVVMENSNIQKQNLDGLYNSVLLELSASDDYEAFKREVEEKGLDVNEAGFWYGRRIGSKKMGSETRTPLMIASLFGSAKVLNYILLQKGGGVDVNRVCGSDRATALHCAXXXXXXXXXXXXXXXXXPGSRFRRRFTERKEAISDNKKEYPVDISLPDINNGVYGTDDFRMYNFKVKPCSRAYSHDWTECPFVHPGENARRRDPRKYPYSCVPCPEFRKGTCQKGDSCEYAHGVFESWLHPAQYRTRLCKDETGCARKVCFFAHKPEELRPVYASTGSAMPSPKSYSASGLDMTAMSPLALSSTSLPNAPPFPASPYRAPSFFSQSEAVQNKINLTPPSLQLPGSRLKAALSARDLEMEMELLGLESPARQQQQQQQQLIEEIARISSPSFRSKEFNRIVDLNPTNLDDLLASADPSVFSQLHGLSVQPSTPTQSGLQMRQNMNHLRASYPSNIPSSPVRKPSAFGFDSSAAVATAVMNSRSAAFAKRSQSFIDRGAATHHLGLSSASNSSCRVSSTLSDWSSPTGKLDWGVNGDKLNKLRKSTSFGFRNSGVTASPIAQPEFGAEPDVSWVHSLVKDVPSERSEIFGAEKQQYDLSKEMLPPWMEQLYIEQEQMVA

SEQ ID NO: 32 - DNA, 2683 bp, Eucalyptus grandis
gcaaaggtcgatcacttcctccctagaaagcgagtgtggagttgaagcttgataaccagaggccgcctctcgtctcgtctcgcccgcctgcgcttgctctgctctccgcgtgccaagggagtgttcctaggtgctgaatctttccatgtgtagcggttcaaaagggaagggagagtgaattcgagaagcagaggatgtcggcccgtcagttctcgatcctgctcgagttatctgctgcggatgatctgacgaactttaagaaagcagttgaggaagacggctacgatattgatgagtcgagcttgtggtatggtaggaggatcgggtcgaagaagattgggcttgaagagagaactcccctcatgattgccgcgatgttcggcagtatgtccgtgctggattatattatcaagtctggccgggccaatgtaaacaaggcgtgtggttcagatggtgctaccgcgcttcactgtgctgcggctggtggctcggtacaatctcctgaggtggtcaagctgttgcttgattcttcagcgaatgctaactccattgatgcgaatgggaaacgagcgggagacttgatttctgaggtctctggttcgcccttcaattcgagaaggaagactttggatgtcatgttgactggaggtgggactgttgagtttgttgaggaaacttacaatctgcctgagaatctgggtagtcaaattgaaggaaacgaacaaagagagagtccaacggcccgcgcttccaaggatggttctgaaaagaaagagtatcctgtcgacctttctcttccggacatcaacaatggaatatatagcacagatgagtttaggatgtattctttcaaagtgaagccttgctcgagagcttactctcatgactggactgagtgtccatttgttcaccctggggagaatgcaagacggcgtgacccacggaaatatcactacagctgtgtgccttgccctgagttccgcaaggggtcatgcaggcaaggggatggctgcgagtatgctcatggtatatttgagtgctggcttcacccagctcaatatcgcacccgtctctgtaaggatgagattggatgcaccagaaaagtctgtttctttgcccacaaacatgaagagcttcgtccattgtatgcatcaactggttcggcgcttccttctccaagatcattttcgcccgttgctgcttctctagacatgggatcactgagccctctctctctcggttcttcttcagtccggataccgccaacttcaacaccacctatgactccatcaggggcctcttctccccttggtgggtcgatgtggaaaagccaaattaatagcactccgcctggcttgcagcttccaggtagcaggttgagaagcgcattgagtgctagagacatggatttagatgttgacttgatcgatctagaaaataattatcgtttgcagaagcagttgctcgaacactttcctgatctgtcctctcctcgtggttggaacaactcttcatccaccacgtcggctttccctgagtattcaggtgacatgactggagaaataagtaggttaggagtaaaaccaaataatctcgaggatagtttcaggtcattggacctgaccctcttgtctcagttacaagggctgtcacttgatggtgcaatatcccagctgcaatctcctactggaatgaagattcggcagaacatgacccagcagctctactcaaactatactgacaagctttcctcgtcacctagggcaatgccatcatttggaaccgatccttccagagcttcagcagcagccactctgagttccaggtcattggcatttgcaaaaaggagccacagcttcattgagcggagtacagtgaacagtcagtctggatattcagcaggtgctgcttctccaactgcaaggatgtcttcccagaatgactggggctcgcccgatggcaaactagactggggcattcaaggggaggagctgaacaagctgaggaaatctgcatcattcgggctcaggagcagcagcaaccgcttccatgcgtctgcagattctgcgacagcaactgtaggggacccagacatgccctggattcagtccttggcaaaggaagccccgtcacaaaaccctggcaattttggagcagagcatcagcagcagcagcagcagcagcagcagcagcagtatcatcttaattctggaggtactgagctgcttccagcttgggtggagcagttgtacgcggatcaggagcagatggtcgcctgagatcaacattggcttcttatctaaccactattagtcatttcgttattgctttaattttttttcttctgagtctagtattaatgtctaggattcgaacgaactggaaaattaaatctagagggaagatgggaagaaaagagcaggatggaaggtttctgctcggtccgagatttctcatagtctattatagactatcgtatttctcgttcttttccgtcccaatgttcttgatttggttctcagcatgttttctggatgaggcttacaaactatgtaatcttgtcttgctaaaagaatcagagctgcacctgcaccaaaggttgtgatactaccgcttattgatgatgatgataataataataattcggacatttagtaccaagtccgatgtctcaaaaaaaaaa

SEQ ID NO: 33 - protein, 694 aa, Eucalyptus grandis
MSARQFSILLELSAADDLTNFKKAVEEDGYDIDESSLWYGRRIGSKKIGLEERTPLMIAAMFGSMSVLDYIIKSGRANVNKACGSDGATALHCAAAGGSVQSPEVVKLLLDSSANANSIDANGKRAGDLISEVSGSPFNSRRKTLDVMLTGGGTVEFVEETYNLPENLGSQIEGNEQRESPTARASKDGSEKKEYPVDLSLPDINNGIYSTDEFRMYSFKVKPCSRAYSHDWTECPFVHPGENARRRDPRKYHYSCVPCPEFRKGSCRQGDGCEYAHGIFECWLHPAQYRTRLCKDEIGCTRKVCFFAHKHEELRPLYASTGSALPSPRSFSPVAASLDMGSLSPLSLGSSSVRIPPTSTPPMTPSGASSPLGGSMWKSQINSTPPGLQLPGSRLRSALSARDMDLDVDLIDLENNYRLQKQLLEHFPDLSSPRGWNNSSSTTSAFPEYSGDMTGEISRLGVKPNNLEDSFRSLDLTLLSQLQGLSLDGAISQLQSPTGMKIRQNMTQQLYSNYTDKLSSSPRAMPSFGTDPSRASAAATLSSRSLAFAKRSHSFIERSTVNSQSGYSAGAASPTARMSSQNDWGSPDGKLDWGIQGEELNKLRKSASFGLRSSSNRFHASADSATATVGDPDMPWIQSLAKEAPSQNPGNFGAEHQQQQQQQQQQQYHLNSGGTELLPAWVEQLYADQEQMVA

SEQ ID NO: 34 - DNA, 2499 bp, Arabidopsis thaliana
attttgaccttaagaagaaagtgacaaggagaggaagaagaagaaaaaaaacataatttgaggaagaagaaaaaaaattcggatttgttttttcaataaattgactaattgagtactcgtttaaaggaagtgaagagcggttttttggtagtggtggtcgagaaaagagagagtttgtctctgtgactcagagtgaaatcaatagagcgggaaaagattgttgcttttttttgccatgggagttgatgagctgtctcacctcaaattctctcttctgctagaatcatcagcctgcaatgatttgtccggttttaagtctctagttgaagaagaaggtcttgagagcattgatggctctggtttgtggtatgggaggagattaggatcaaagaagatgggttttgaggagaggacgcctcttatgattgctgccttgtttggaagcaaagaggttgttgattacatcattagtactggtcttgttgacgtgaaccgctcttgtggctctgatggtgccacggctcttcactgtgcggtctctggcttgtctgccaatagccttgagattgttactcttctgctgaagggctctgcgaatccggattcttgtgatgcttatggtaacaagcctggagatgtgattttcccttgtttgagtccggtttttagcgcgaggatgaaggttttggagcgtttgttgaaaggaaatgatgatttgaatgaagttaatgggcaagaagaaagcgagccagaggttgaggttgaggttgaggtttcgcctcctcgggggtctgagaggaaggagtatccggttgatccaacgcttcctgatatcaagaacggtgtatatgggacggatgagttccggatgtatgctttcaagatcaagccgtgctctagagcatactctcacgactggacggaatgtccctttgttcatccgggtgagaacgcaaggaggcgtgatccgaggaagtaccattatagttgtgtcccttgtcctgaattccggaaggggtcttgttccagaggtgatacttgcgagtatgctcatggtatctttgagtgctggcttcacccggctcagtaccggactcgtctctgcaaggacgagacgaattgctcgagaagagtttgtttctttgcccacaaacccgaggagctgcgtcctttgtacccttcaactggatcaggtgttccgtccccgcggtcttccttctcatcttgcaattcctcgaccgctttcgacatgggaccgattagtccgcttcctatcggagcaacaaccacacctcctttgagtcctaacggtgtatcctctccaataggtggaggaaaaacgtggatgaactggcctaacataacccctcctgcattgcagcttccagggagcagattgaaatctgcattgaatgcaagagaaatcgatttctctgaagagatgcaaagtcttacttctccaactacatggaacaacacgccaatgtcatctccattctccggaaagggcatgaacaggcttgcaggaggagcaatgagcccggtgaatagtctcagtgatatgtttgggacagaggataatacatcgggtttgcagatccgacgcagcgtcattaacccgcagctgcattccaacagtctttcttcatcacctgtgggagccaattctctgttttcgatggattcctccgcagtcttggcttcaagagcggctgaatttgctaaacagcgaagccaaagcttcatagaacgcaacaacggactgaatcaccatcccgcaatctcttccatgactacaacttgtttaaacgattggggctcattggatgggaagcttgactggagcgtccaaggagacgagctacagaagctcagaaaatccacttctttccgtctcagagccggtggcatggaatcaagactgcctaacgaagggactgggctcgaagagccagatgtctcatgggtggagccgctggtgaaagagccacaggagacaagactagctccggtttggatggagcaatcatacatggagacagaacagaccgtggcttgaatcaaaagttttgaactttcattaaccgttccacaagaagcaaagtcagaaagattccgagaggtcgatgctaatctatttcattttatttgtttaatgctttgttatttttctttagaataaaaagaaaaaattcttaggggacaaaagagagttcgtttgtctctctctctgtctccaaagaaaaacagaggtgaaaaaaggtttcaaaacctaagaaaccttgaattacctcacctcacttccttgattctttactattcacaatgagtaatcgatttttttttttcttggtaacactctcacgctgaatatatatgttttttagtaataatataattggaatacagaaatgtatttacacttgtgaagttagggaaagtgttgtaattgtttcttctaagagttgatctaagatgtttgagactatatcttcgctt

SEQ ID NO: 35 - protein, 607 aa, Arabidopsis thaliana
MGVDELSHLKFSLLLESSACNDLSGFKSLVEEEGLESIDGSGLWYGRRLGSKKMGFEERTPLMIAALFGSKEVVDYIISTGLVDVNRSCGSDGATALHCAVSGLSANSLEIVTLLLKGSANPDSCDAYGNKPGDVIFPCLSPVFSARMKVLERLLKGNDDLNEVNGQEESEPEVEVEVEVSPPRGSERKEYPVDPTLPDIKNGVYGTDEFRMYAFKIKPCSRAYSHDWTECPFVHPGENARRRDPRKYHYSCVPCPEFRKGSCSRGDTCEYAHGIFECWLHPAQYRTRLCKDETNCSRRVCFFAHKPEELRPLYPSTGSGVPSPRSSFSSCNSSTAFDMGPISPLPIGATTTPPLSPNGVSSPIGGGKTWMNWPNITPPALQLPGSRLKSALNAREIDFSEEMQSLTSPTTWNNTPMSSPFSGKGMNRLAGGAMSPVNSLSDMFGTEDNTSGLQIRRSVINPQLHSNSLSSSPVGANSLFSMDSSAVLASRAAEFAKQRSQSFIERNNGLNHHPAISSMTTTCLNDWGSLDGKLDWSVQGDELQKLRKSTSFRLRAGGMESRLPNEGTGLEEPDVSWVEPLVKEPQETRLAPVWMEQSYMETEQTVA

SEQ ID NO: 36 - DNA, 1806 bp, Oryza sativa
atgtgctctgggccgcgcaagccgtccacaccgccgctgccgcagcagcagaaggaggcgacggtgatggcggcgtccttgcttcttgagctggcggcagcggacgacgtggcggcggtgaggagggtcgtggaggaggagaaggtgtctcttggcgtggctgggttgtggtatgggccttcggcgagcggcgtggcgaggctcgggatggagcggaggacggcggcgatggtggcggcgctgtacgggagcacgggggtgcttgggtatgtcgtggcggcagcgccggcggaggccgcgcgcgcgtcggagacggatggggccacgccgctgcacatggcggctgccggtggcgcggcgaacgcggtcgcggccacgcgcctgttgctcgccgcgggggcgtcggtcgacgcgctctcggcttcggggctccgcgccggtgacctcctcccgcgcgccaccgcggcggagaaggccatccggctgctgctcaagtcgccggccgtgtcgccgtcgtcgtcgccgaagaagtcggcctcgccgccgtcgccgccgccgccgcaggaggcgaagaaggagtacccgcctgacctgacgctgcccgacctcaagagcggactgttcagcaccgacgagttccgcatgtacagcttcaaggtgaagccgtgctcccgcgcctactcccatgactggaccgagtgccccttcgtccaccccggcgagaacgcgcgccgccgcgaccctcgccgctactcctacagctgcgtgccttgcccggagttccgcaagggcggctcgtgccgcaagggcgacgcgtgcgagtacgcccatggcgtgttcgagtgctggctccacccggcgcagtacaggacgcgcctctgcaaggacgaggtcggctgcgcgcgccgcatctgcttcttcgcccacaagcccgacgagctccgcgccgtcaacccctccgccgtgtccgtcggcatgcagcccaccgtatcgtcgccgcgctcctcgccgcccaacgggctcgacatggcggcggcggcggcggcgatgatgagccccgcctggccgtcgtccccagcgagccgcctcaagacggcgctcggcgcgcgggagctcgacttcgacctcgagatgctcgcgctggaccagtaccagcagaagctgttcgacaaggtgtccggcgcgccgtcgccgagggcgagctggggcgccgcggcgaacggcctcgccaccgcgtcgccggcgagggccgtgccggactacaccgacctgctcggctccgtcgacccggccatgctgtcccagctccacgcgctgtccctcaagcaggccggcgacatgcccgcgtacagctccatggcggacaccacgcagatgcacatgccgacctcgccgatggtgggcggcgcgaacaccgcgttcgggctggaccactccatggcgaaggcgatcatgagctcccgcgcctcggcgttcgccaagcgcagccagagcttcatcgaccgcggaggccgcgccccggcggcgcgttcgctcatgtcgccggcgacgaccggcgcgccgtccattctctcggactggggctcgccggacggcaagctggactggggcgtccagggcgacgagctgcacaagctccgcaagtcggcgtcgttcgcgttccgcggccaatccgccatgccggtggcgacgcacgccgcggcggcggagccggacgtgtcatgggtgaactctcttgtcaaggacggccacgccgccggcgacatattcgcgcagtggccggagcaggagcagatggtggcatga

SEQ ID NO: 37 - protein, 601 aa, Oryza sativa
MCSGPRKPSTPPLPQQQKEATVMAASLLLELAAADDVAAVRRVVEEEKVSLGVAGLWYGPSASGVARLGMERRTAAMVAALYGSTGVLGYVVAAAPAEAARASETDGATPLHMAAAGGAANAVAATRLLLAAGASVDALSASGLRAGDLLPRATAAEKAIRLLLKSPAVSPSSSPKKSASPPSPPPPQEAKKEYPPDLTLPDLKSGLFSTDEFRMYSFKVKPCSRAYSHDWTECPFVHPGENARRRDPRRYSYSCVPCPEFRKGGSCRKGDACEYAHGVFECWLHPAQYRTRLCKDEVGCARRICFFAHKPDELRAVNPSAVSVGMQPTVSSPRSSPPNGLDMAAAAAAMMSPAWPSSPASRLKTALGARELDFDLEMLALDQYQQKLFDKVSGAPSPRASWGAAANGLATASPARAVPDYTDLLGSVDPAMLSQLHALSLKQAGDMPAYSSMADTTQMHMPTSPMVGGANTAFGLDHSMAKAIMSSRASAFAKRSQSFIDRGGRAPAARSLMSPATTGAPSILSDWGSPDGKLDWGVQGDELHKLRKSASFAFRGQSAMPVATHAAAAEPDVSWVNSLVKDGHAAGDIFAQWPEQEQMVA

SEQ ID NO: 38 - DNA, 1692 bp, Hordeum vulgare
cggcacgaggcacatccatcatctaacctcacctctcctctcctcccctctcctcctaccaaacccaaaaccaagcagagcaagagcaagagcaagagcaagagcaagcaagcatgtgccctggcctgcgcaacctcgccgccgccatgccaccctccgcccacgaccacccctcctcctacctgctcgagctcgccgccgacgacgacctccccgccttccgccgcgccgtccaggaggacaacctctccctcgacgccgcatccccgaggtacgagccatcccccaaatcagaccaacaacaacaacacgccccagctcgcgctccacctgcgcacccccgccatggtcgccgcgctctacggcagcaccaccgtcctctcctacgtcctctccatcgccccctccgaggccgcccgcgcctccgcatccgacggcgccaccccgctcctcctcgcccaccagggccgcgcgccatccgcgccccacgccgcacgcctcctcctcaccgacggcgcatcatcgtcctccctactcgcgccccaagctcaccctctcaaccaccaaaaccaaaaccaaaacagccccaccaagaaagactcgccgccggactccaggaggaccaccaccaagaaggactactcctccgcctccgactcccagacggaggacatcaacgcgggcgtcttcgccaccgacgacttccggatgtacagcttcaaggtgaacccgtgctcccgcgcctacacgcacgactggaccgagtgccccttcgcccaccccggcgagaacgcgcgccgccgcgacccgcgccgcgtgccatactcgtgcgtcccatgcccggacttccgccgcgacccggccgcatgccgcaagggcgacgcctgcgagtacgcgcacggcgtcttcgagtcatggctccaccccgcgcagtaccgcaccaggctctgcaaggacgaggtcggatgcccgcgccgcatctgcttcttcgcgcacggcgcccgacagctacgcgccgtcaacccctccgccgcatccatggactcgccatccccaacttcctcttcgccgccgcgaacctccaggccggccgcgctcaccgcgtcgctcagctcgcgggacctcgacttggacgccgacaaccaggcccagtacgcgcgcaggatgatgatggccagggccaactccccgccggactactcgcccgacctcgtcgccgcctacgtacaggcgctctcctccctgcaacagcagcagcatcagcagaaccagcaacagcagcatcagcagcagaaccagcaccagcagcaacatcagcagaaccagcaccagcagcatcagcagcaacatcagcagagcatggggatgggggggctgagcgcccgcgccgccgccttcaccaaccgcagccagaccttcgtgcaccgctctccgtccccggctccggcgcggtcgttcaagtctccggcgccgtcgtccatgctcgcggactgggggtcgccggacgggaagctggactggggcgtgcaggccgcggagctgcgcaagtccacgtctttcggagtcagaagcagcagcaggccgcatcatgagacgacgagggcggaggacaacatgtacccgtcgtggatgaaggacggcagcgatatgctgctggcggcgcggtggtcggacctggagcagatggtcgcc

SEQ ID NO: 39 - protein, 564 aa, Hordeum vulgare
RHEAHPSSNLTSPLLPSPPTKPKTKQSKSKSKSKSKQACALACATSPPPCHPPPTTTPPPTCSSSPPTTTSPPSAAPSRRTTSPSTPHPRGTSHPPNQTNNNNTPQLALHLRTPAMVAALYGSTTVLSYVLSIAPSEAARASASDGATPLLLAHQGRAPSAPHAARLLLTDGASSSSLLAPQAHPLNHQNQNQNSPTKKDSPPDSRRTTTKKDYSSASDSQTEDINAGVFATDDFRMYSFKVNPCSRAYTHDWTECPFAHPGENARRRDPRRVPYSCVPCPDFRRDPAACRKGDACEYAHGVFESWLHPAQYRTRLCKDEVGCPRRICFFAHGARQLRAVNPSAASMDSPSPTSSSPPRTSRPAALTASLSSRDLDLDADNQAQYARRMMMARANSPPDYSPDLVAAYVQALSSLQQQQHQQNQQQQHQQQNQHQQQHQQNQHQQHQQQHQQSMGMGGLSARAAAFTNRSQTFVHRSPSPAPARSFKSPAPSSMLADWGSPDGKLDWGVQAAELRKSTSFGVRSSSRPHHETTRAEDNMYPSWMKDGSDMLLAARWSDLEQMVA

SEQ ID NO: 40 - DNA, 3610 bp, Pinus radiata
tgtttccaggcgggcactaaagcaagggagggggtaggctttactttctgctctgcgcaaagaacgttgaaatcaatcgccctggctggtctggcgtgactactagattcaatttcttcatggccgtcttcacatacccattctttaccggttcagagctgtgatctttatttttaacagccacaatcatggtttgtgtttccagtgttatgatctgagtgaagttcgttctttttctcgtgacccaggcttgatactaggccggacctttctgaggtggaagagatctatacatttgaggcctattttgtgtagccatgtgtggaggcccagaacatttgaagcctgccagcccacacgaaggagaagataaagtcaaaatggccgagaatcagtctatcaaagtgaaggaattgtctgaatcttgttcaagtctacatgaactagctgctaataatgaccttattggctttaagaaagcaatggaggaagaagggtcaaagatagatgaggttaacttttggtacgggaggcagaatggttctaatcagatggtcctggagcaaaggactccattgatggttgctgcactttatggcagtgtagatgcgctgagttacatcttatccatttatgtaacttgtggagcagatgttaaccaagcctgtgggtcagataactccactgccttgcattgtgcggctgtgggagggtctgcctgtgcagttgaaactgtaaaattgttacttcatgcaggcagtgatgtgaatcgcttggatgcttatggcagaagaccagcagatgtgattatggtttctcctaagctaaccgaaatcaaggccaagctagaagaaatgttaaacgcagctggttcatgtcaaacttctccggcaaagttgcctaacatagtttcagggccacctgggtttgagtcaaaggggatggagtccatgtccccattgccattgttgcctctttcattgtctttagaagcatccaataatagatcaggttgtgtgaattctccaacatcttcgccaaagtccatggaagcattaaagggtttcggtgatgttaatgagaagaaggaatatcctgtggacccttcttttccagacataaagaatagcatctatactacagatgaatttcggatgttttccttcaaggtgcggccatgttcacgggcatattctcatgattggactgaatgcccatttgtgcatcctggtgaaaatgccagaaggcgggatccaagaaggtatcattatagctgtgttccttgcccagattttcggaaagggacttgtaggcgcagtgatgtttgtgaatatgcacacggtgtttttgagtgctggttacatcctgctcaatataggacacggttgtgcaaagatgggactaattgttcacgtagagtttgcttctttgctcacacatctgaggaactacgccctctcattgtctctactgggtctgctgttccatccccaagggcatcatcatctctggacatgacatctgtcatgagtcctcttgcccctggttctccctcttcagtttcaatgatgtcacccttcctatcaaatcctcagcaaggcagtgtgcttactccgcctatgtctccatcagcgtcctctgtaaatggatatggaggctggccacagcctaatgtaccaaccttacaccttcctggtagcaatgttcaaaccagccgtcttagagcggaacttaatgccagagacatgcctgttgaggattctcctcgaatttcagactatgaagggcagcaactcctgaatgatttttctccactgtccacacaagccaggctgaatgctgctgctgctgttatatctggtggcgggaacaccacaacaaggtctggaaaatacaagagtcacgggatcaatactgttgctccaacgaatcttgaagacttgtttgcctccgaggtaacatctcctagagtagcagttcttgaaccttccatcttttctcagatgagtccccaaatgcaagctcataagactgcccaggcatatatgcagattcaaaaccagatgctgcctcctataaatacacaggcattttcgcagggaattacacagatgcagcaggctgcaatagagcctcagagccctggacattctttgatgcaatcacctttccaatcttcctcgtatgggttgggatcccctggtagaatgtcacctcgttgtgtggatgtggaacgtcataatacatgtgggtctcccttatcaccggctatggctgcaacgataaattcaagaatggctatggctgcttttgttcagagggaaaaacggagccatagttcccgtgacttgggagctaatgtgaatcccagttcatggtctgattggggctcgcctacaggtaaagttgactggggggttcaaggagaagagttgagcaaattaagaaagtcggcttcatttggtccccgcagttatgaagaaccggatttgtcttgggttcaaacactggtaaaggaaactacaccagagggtaaagatggaggaaatgtaagctgttctggggaaactccacacaaggggcaaatagaaaatgttgatcattcagttttgggtgcctggattgaacagatgcagcttgatcagattgtagcttgagattaggattatttatttggagtggtggtagggataggctcatttaaaattcaatttctcattttttactatttcttttataaaaattccccattatagtttaggaaatagtctggttttctacctattatcagaattacacctgcaggaaattttggaggaaagcatgcaaaaagtagatagggatgttattcctatcagcaggttgacaagctgaaaatcacttgggtggtagaccagagaatgacactattttttgttgacatggcaactgaagatgctgttttctttacttatcattaacaaccctatatatatttgttttgaaagaactgagcggagaaatgttgtcagttggttactctgcgcaaggccttggaagaaatccaagatgtggcatcttggtgcatttttaatttatcaagtgtgaaatccataacaggtttcagtgagtgacttctgaggttgtatatggaaaaacctatgatgttggctgtctactgctatttttctgtgcctaaactgtcaactaaagtttgcaggtggcaattttgtggcagcatatttgcacattgaagcggatggtctgcacctgctatagaagttttcgagtctgtagaatttgatggtgcaagatgattttctagttgatatatttggaaggctttgccaaagtagtggcatgtacattttgcaaaaatttaaaggatggcaatccattgttttgccatgtagcttcactttattgattaggtggaaaggaattttgagacacttcaatttgtgcatacttttgttctgaactgcaaaatcagtctcttgtgatgtcctcaaggctattatgctcagggatttgcctaaaaccataagtggccttagataaggtaccattgtattaccttttattgtttggatattttatttatgaaagtgaatttattttaaaaaaaaaa

SEQ ID NO: 41 - protein, 779 aa, Pinus radiata
MCGGPEHLKPASPHEGEDKVKMAENQSIKVKELSESCSSLHELAANNDLIGFKKAMEEEGSKIDEVNFWYGRQNGSNQMVLEQRTPLMVAALYGSVDALSYILSIYVTCGADVNQACGSDNSTALHCAAVGGSACAVETVKLLLHAGSDVNRLDAYGRRPADVIMVSPKLTEIKAKLEEMLNAAGSCQTSPAKLPNIVSGPPGFESKGMESMSPLPLLPLSLSLEASNNRSGCVNSPTSSPKSMEALKGFGDVNEKKEYPVDPSFPDIKNSIYTTDEFRMFSFKVRPCSRAYSHDWTECPFVHPGENARRRDPRRYHYSCVPCPDFRKGTCRRSDVCEYAHGVFECWLHPAQYRTRLCKDGTNCSRRVCFFAHTSEELRPLIVSTGSAVPSPRASSSLDMTSVMSPLAPGSPSSVSMMSPFLSNPQQGSVLTPPMSPSASSVNGYGGWPQPNVPTLHLPGSNVQTSRLRAELNARDMPVEDSPRISDYEGQQLLNDFSPLSTQARLNAAAAVISGGGNTTTRSGKYKSHGINTVAPTNLEDLFASEVTSPRVAVLEPSIFSQMSPQMQAHKTAQAYMQIQNQMLPPINTQAFSQGITQMQQAAIEPQSPGHSLMQSPFQSSSYGLGSPGRMSPRCVDVERHNTCGSPLSPAMAATINSRMAMAAFVQREKRSHSSRDLGANVNPSSWSDWGSPTGKVDWGVQGEELSKLRKSASFGPRSYEEPDLSWVQTLVKETTPEGKDGGNVSCSGETPHKGQIENVDHSVLGAWIEQMQLDQIVA

SEQ ID NO: 42 - DNA, 3610 bp, Pinus radiata; identical to SEQ ID NO: 40

SEQ ID NO: 43 - protein, 749 aa, Pinus radiata
MKEMAEYCSPALLELAANNDLSGFKQAVEEGGSSVNERGLWYGRQIGSGQKMVLEQRTPLMVAALYGSLDVLSYMLSGGRVDVNQSCGSDMSTALHCAAAGGSILAIETVGMLIKAGADVNFMNAGGRKPADVIMVSPKLAHFKNVLEDLLIMGSNSPMKIPCRVSGSGFYLPEGGGCFFDEHGCVVSVPTSSPLFSSPDATSPATVNSPLSSPPTSLDTPKNLCDCGQKKEFAVDSSLPDIKNSIYSTDEFRMYSFKVRPCSRAYSHDWTECPFVHPGENARRRDPRKYHYSCVPCPDFRKGACRRGDVCEYAHGVFECWLHPAQYRTRLCKDGTNCSRRVCFFAHTPEELRPLYPPACSSMLSQRTTMTSSDKMAVMHPLAPGSASSVLMMSSSNSSQSSFPNSPVSPLSSANTSSHSSFGGGSWAHPNLPTLHLSNGALQASRLRTAVNARDMHPDCSIESGDYEGQLLNEFAYLSTQARGNGPMATVSSSGNTPCRPRKFRAHNVAPTNLEDLFASEVFSPKMTASESAFLSEIQSHKSAQLSPQLQSQMLSSFNTQVYPQGSTQGQMHMQHGGVDCQSPSVFLSPPPVQLASYSLSSLGPLSSLTGELERQNSNGSPLSPIMSTAADSRAVAFSQRDKGSSRSGDLGGATTWSEWGSPTGKVNWGIRGEELQKFRKSASFGIRSSDEPDLSWVQKLFKEAPMESMDRGTMGRSMDIANSVQMEATDLGGWISQINPDQVAPLTL

SEQ ID NO: 44 - protein, 711 aa, Glycine max
KSANDKEMKSLTVNTEDSFSSLLELASNNDIEGFKVLLEKDSSSINEVGLWYGRQNGSKQFVLEHRTPLMVAATYGSIDVMKIILLCPEADVNFACGANKTTALHCAASGGSANAVDAVKILLSAGADVNGVDANGNRPIDVIAVPPKLQGAKAVLEELLSDSASEGSIGEFSVPVSVNTSSLGSPGHSSNGMPYTPSSSPPSPVVAKFTDAAVCSLSEKKEYPIDPSLPDIKNSIYATDEFRMFSFKVRPCSRAYSHDWTECPFVHPGENARRRDPRKFHYSCVPCPDFRKGACRRGDMCEYAHGVFECWLHPAQYRTRLCKDGTSCNRRVCFFAHTAEELRPLYVSTGSAVPSPRSSASAPNVMDMAAAMSLLPGSPSSVSSMSPSHFGQPMSPSANGMSLSSAWAQPNVSALHLPGSNLQSSRLRSSLSARDMPPDDLNMMSDLDGQQQHPLNDLSCYLQPRPGAGSVSRSGRSKILTPSNLEDLFSAEISSSPRYSDPAAGSVFSPTHKSAVLNQFQQLQSMLSPINTNLLSPKNVEHPLLQASFGVSPSGRMSPRSVEPISPMSSRISAFAQREKQQQQQQQLRSLSSRDLGANSPASLVGSPANPWSKWGSPNGKADWSVNGDTLGRQMRRSSSFELKNNGEEPDLSWVQSLVKESPPEMIKEKFASPMPTASADGPNSNSQIESIDHSVLGAWLEQMQLDQLVV

SEQ ID NO: 45 - protein, 643 aa, Glycine max
RGSGFPGRPTRPRSGRTRGRTRGVNFACGANKTTALHCAASGASTKAVDAVKLLLSAGADVNCVDANGNRPIDVIAVPPKLQGAKAVLEELLSDNASDVSVGEFSVPVSVNSSSPGSPAHSSNGMPYTPSVSPPSPVAAKFTDAAICSLSEKAREYPIDPSLPDIKNSIYATDEFRMFSFKVRPCSRAYSHDWTECPFVHPGENARRRDPRKFHYSCVPCPDFRKGACRRGDMCEYAHGVFECWLHPAQYRTRLCKDGTSCNRRVCFFAHTAEELRPLYVSTGSAAPSPRSSASGPNVMDMAAAMSLFPGSPSSGSSISLSISFSLDPMSPSANGMPLSSAWAQPNVPALHLPGSNLQSSRLRSSLSARDIPPEDLNMMSDLDGQQQHHLNDLSCYIQPRPGASSVSRSGRSKTLTPSNLEELFSAEISLSPRYSDPAAGSVFSPTHKSAVLNQFQQLQSMLSPINTNLLSPKNVEHPLFQASFGVSPSGRMSPRSVEPISPMSARLSAFAQREKQQQQLRSVSSRDLGANSPASLVGSPANPWSKWGSPIGKADWSVNGDSLGRQMRRSSSFERKNNGEEPDLSWVQSLVKESPPEMIKEKFASPMPTASADGPNSNSQIESIDHSVLGAWLEQMQLDQLVV

SEQ ID NO: 46 - protein, 669 aa, Glycine max
SHEMNHLSLDTEDSLASLLLELAANNDVSGFKRLIECEPSSIDEVGLWYGRHKESKKMVNEQRTPLMVAATYGSIDVMTLILSLSEADVNRSSGLDKSTALHCAASGGSENAVDAVKLLLEAGADRNSVDANGRRPGDVIVSPPKLDYVKKSLEELLGSDDWSLLRVMRSTCNGCSAEDLKMKTNEVSEKKEYPVDLSLPDIKNSIYSSDEFRMYSFKVRPCSRAYSHDWTECPFVHPGENARRRDPRKFHYSCVPCPEFRKGACRRGDMCEYAHGVFECWLHPAQYRTRLCKDGTNCARRVCFFAHTNEELRPLYVSTGSAVPSPRSSASSAMDFVAAISPSSMSVMSPSPFTPPMSPSSASIAWPQPNIPALHLPGSNFHSSRLRSSLNARDFSVDDFDLLLPDYDHHHHQQQQQQFLNELSCLSPHAMNCNTMNRSGRMKPLTPSNLDDLFSAESSSPRYADPALASAVFSPTHKSAVFNQFQHQQSMLAPLNTNFASKNFEHPLLQASLGMSPRNVEPISPMGSRISMLAQREKQQFRSLSFRELGSNSAAASADSWSKWGSPNVKLDWPVGAGEVGKLRRSSSFELGNNGEEPDLSWVQSLVKESPAEVKDKLATTVSYVAAAAAGSSSEGSNISTQMESVVDHAVLGAWLEQMQLDHLVAQQN

SEQ ID NO: 47 - protein, 580 aa, Arabidopsis thaliana
MCSGPKSNLCSSRTLTEIESRQKEEETMLLLEFAACDDLDSFKREVEEKGLDLDESGLWYCRRVGSKKMGLEERTPLMVAAMYGSIKVLTFIVSTGKSDVNRACGEERVTPLHCAVAGCSVNMIEVINVLLDASALVNSVDANGNQPLDVFVRVSRFVASPRRKAVELLLRGGGVGGLIDEAVEEEIKIVSKYPADASLPDINEGVYGSDEFRMYSFKVKPCSRAYSHDWTECAFVHPGENARRRDPRKYPYTCVPCPEFRKGSCPKGDSCEYAHGVFESWLHPAQYKTRLCKDETGCARKVCFFAHKREEMRPVNASTGSAVAQSPFSSLEMMPGLSPLAYSSGVSTPPVSPMANGVPSSPRNGGSWQNRVNTLTPPALQLNGGSRLKSTLSARDIDMEMEMELRLRGFGNNVEETFGSYVSSPSRNSQMGQNMNQHYPSSPVRQPPSQHGFESSAAAAVAVMKARSTAFAKRSLSFKPATQAAPQSNLSDWGSPNGKLEWGMKGEELNKMRRSVSFGIHGNNNNNAARDYRDEPDVSWVNSLVKDSTVVSERSFGMNERVRIMSWAEQMYREKEQTVV

SEQ ID NO: 48 - protein, 719 aa, Arabidopsis thaliana
MCCGSDRLNQIVSSRSSLPISFEEDNNLVTNTDMNHITVETEDTFASLLELAANNDVEGVRLSIERDPSCVDEAGLWYGRQKGSKAMVNDYRTPLMVAATYGSIDVIKLIVSLTDADVNRACGNDQTTALHCAASGGAVNAIQVVKLLLAAGADLNLLDAEGQRAGDVIVVPPKLEGVKLMLQELLSADGSSTAERNLRVVTNVPNRSSSPCHSPTGENGGSGSGSPLGSPFKLKSTEFKKEYPVDPSLPDIKNSIYATDEFRMYSFKVRPCSRAYSHDWTECPFVHPGENARRRDPRKFHYSCVPCPDFRKGACRRGDMCEYAHGVFECWLHPAQYRTRLCKDGTGCARRVCFFAHTPEELRPLYASTGSAVPSPRSNADYAAALSLLPGSPSGVSVMSPLSPSAAGNGMSHSNMAWPQPNVPALHLPGSNLQSSRLRSSLNARDIPTDEFNMLADYEQQQLLNEYSNALSRSGRMKSMPPSNLEDLFSAEGSSSPRFTDSALASAVFSPTHKSAVFNQFQQQQQQQQQQSMLSPINTSFSSPKSVDHSLFSGGGRMSPRNVVEPISPMSARVSMLAQCVKQQQQQQQQQQQQQHQFRSLSSRELRTNSSPIVGSPVNNNTWSSKWGSSNGQPDWGMSSEALGKLRSSSSFDGDEPDVSWVQSLVKETPAEAKEKAATSSSGEHVMKQPNPVEPVMDHAGLEAWIEQMQLDQLVAQQN

SEQ ID NO: 49 - protein, 686 aa, Arabidopsis thaliana
MNHITVETEDTFASLLELAANNDVEGVRLSIERDPSCVDEAGLWYGRQKGSKAMVNDYRTPLMVAATYGSIDVIKLIVSLTDADVNRACGNDQTTALHCAASGGAVNAIQVVKLLLAAGADLNLLDAEGQRAGDVIVVPPKLEGVKLMLQELLSADGSSTAERNLRVVTNVPNRSSSPCHSPTGENGGSGSGSPLGSPFKLKSTEFKKEYPVDPSLPDIKNSIYATDEFRMYSFKVRPCSRAYSHDWTECPFVHPGENARRRDPRKFHYSCVPCPDFRKGACRRGDMCEYAHGVFECWLHPAQYRTRLCKDGTGCARRVCFFAHTPEELRPLYASTGSAVPSPRSNADYAAALSLLPGSPSGVSVMSPLSPSAAGNGMSHSNMAWPQPNVPALHLPGSNLQSSRLRSSLNARDIPTDEFNMLADYEQQQLLNEYSNALSRSGRMKSMPPSNLEDLFSAEGSSSPRFTDSALASAVFSPTHKSAVFNQFQQQQQQQQQQSMLSPINTSFSSPKSVDHSLFSGGGRMSPRNVVEPISPMSARVSMLAQCVKQQQQQQQQQQQQQHQFRSLSSRELRTNSSPIVGSPVNNNTWSSKWGSSNGQPDWGMSSEALGKLRSSSSFDGDEPDVSWVQSLVKETPAEAKEKAATSSSGEHVMKQPNPVEPVMDHAGLEAWIEQMQLDQLVAQQN

SEQ ID NO: 50 - protein, 633 aa, Arabidopsis thaliana
MVNDYRTPLMVAATYGSIDVIKLIVSLTDADVNRACGNDQTTALHCAASGGAVNAIQVVKLLLAAGADLNLLDAEGQRAGDVIVVPPKLEGVKLMLQELLSADGSSTAERNLRVVTNVPNRSSSPCHSPTGENGGSGSGSPLGSPFKLKSTEFKKEYPVDPSLPDIKNSIYATDEFRMYSFKVRPCSRAYSHDWTECPFVHPGENARRRDPRKFHYSCVPCPDFRKGACRRGDMCEYAHGVFECWLHPAQYRTRLCKDGTGCARRVCFFAHTPEELRPLYASTGSAVPSPRSNADYAAALSLLPGSPSGVSVMSPLSPSAAGNGMSHSNMAWPQPNVPALHLPGSNLQSSRLRSSLNARDIPTDEFNMLADYEQQQLLNEYSNALSRSGRMKSMPPSNLEDLFSAEGSSSPRFTDSALASAVFSPTHKSAVFNQFQQQQQQQQQQSMLSPINTSFSSPKSVDHSLFSGGGRMSPRNVVEPISPMSARVSMLAQCVKQQQQQQQQQQQQQHQFRSLSSRELRTNSSPIVGSPVNNNTWSSKWGSSNGQPDWGMSSEALGKLRSSSSFDGDEPDVSWVQSLVKETPAEAKEKAATSSSGEHVMKQPNPVEPVMDHAGLEAWIEQMQLDQLVAQQN

SEQ ID NO: 51 - protein, 678 aa, Arabidopsis thaliana
MNDAAEWEHSFSALLEFAADNDVEGFRRQLSDVSCINQMGLWYRRQRFVRRMVLEQRTPLMVASLYGSLDVVKFILSFPEAELNLSCGPDKSTALHCAASGASVNSLDVVKLLLSVGADPNIPDAHGNRPVDVLVVSPHAPGLRTILEEILKKDEIISEDLHASSSSLGSSFRSLSSSPDNGSSLLSLDSVSSPTKPHGTDVTFASEKKEYPIDPSLPDIKSGIYSTDEFRMFSFKIRPCSRAYSHDWTECPFAHPGENARRRDPRKFHYTCVPCPDFKKGSCKQGDMCEYAHGVFECWLHPAQYRTRLCKDGMGCNRRVCFFAHANEELRPLYPSTGSGLPSPRASSAVSASTMDMASVLNMLPGSPSAAQHSFTPPISPSGNGSMPHSSMGWPQQNIPALNLPGSNIQLSRLRSSLNARDIPSEQLSMLHEFEMQRQLAGDMHSPRFMNHSARPKTLNPSNLEELFSAEVASPRFSDQLAVSSVLSPSHKSALLNQLQNNKQSMLSPIKTNLMSSPKNVEQHSLLQQASSPRGGEPISPMNARMKQQLHSRSLSSRDFGSSLPRDLMPTDSGSPLSPWSSWDQTHGSKVDWSVQSDELGRLRKSHSLANNPNREADVSWAQQMLKDSSSPRNGNRVVNMNGARPLTQGGSSVNPHNSDTRESDILDAWLEQLHLDR

SEQ ID NO: 52 - protein, 640 aa, Arabidopsis thaliana
MGLWYRRQRFVRRMVLEQRTPLMVASLYGSLDVVKFILSFPEAELNLSCGPDKSTALHCAASGASVNSLDVVKLLLSVGADPNIPDAHGNRPVDVLVVSPHAPGLRTILEEILKKDEIISEDLHASSSSLGSSFRSLSSSPDNGSSLLSLDSVSSPTKPHGTDVTFASEKKEYPIDPSLPDIKSGIYSTDEFRMFSFKIRPCSRAYSHDWTECPFAHPGENARRRDPRKFHYTCVPCPDFKKGSCKQGDMCEYAHGVFECWLHPAQYRTRLCKDGMGCNRRVCFFAHANEELRPLYPSTGSGLPSPRASSAVSASTMDMASVLNMLPGSPSAAQHSFTPPISPSGNGSMPHSSMGWPQQNIPALNLPGSNIQLSRLRSSLNARDIPSEQLSMLHEFEMQRQLAGDMHSPRFMNHSARPKTLNPSNLEELFSAEVASPRFSDQLAVSSVLSPSHKSALLNQLQNNKQSMLSPIKTNLMSSPKNVEQHSLLQQASSPRGGEPISPMNARMKQQLHSRSLSSRDFGSSLPRDLMPTDSGSPLSPWSSWDQTHGSKVDWSVQSDELGRLRKSHSLANNPNREADVSWAQQMLKDSSSPRNGNRVVNMNGARPLTQGGSSVNPHNSDTRESDILDAWLEQLHLDR

SEQ ID NO: 53 - DNA, 2158 bp, Oryza sativa
tgctccttcttcattgcaaagaaagcaccaccttttaaagaatcctcctcacactccattcttcttaaaaaacccaccacaacacaattcccacttgtttcttcatcatcacctacttcaatcaaaaaacattccaactttcttctcaatttcattccaggatagtattatgtgcagtggaccaaagagcaatctctgctcttcaagaaccttaacagaaatcgaatcaaggcaaaaggaagaagaaacaatgcttctcctcgaattcgctgcttgtgatgatcttgactcgttcaagagagaggttgaagagaaagggcttgatttggatgagtcagggttatggtattgcagacgtgtcggttctaagaagatgggtcttgaagaaagaacacctttaatggttgcagctatgtatggaagcataaaggttttgactttcatcgtttccactggaaaatctgatgtgaacagagcttgtggtgaagagagagttactccgcttcactgtgctgttgctggctgttctgtgaatatgattgaagtcatcaatgtcttgcttgatgcttctgctttggttaactctgttgatgctaatgggaatcaacctttggatgtgtttgttcgagtttcgaggtttgtggctagtccgaggaggaaagcggttgagttgttgctgagaggaggaggtgttggaggattgatcgatgaggcggttgaagaagagatcaagattgtctctaagtatccagctgatgcttctttaccggatataaacgaaggggtttatggaagtgatgagtttaggatgtatagctttaaggttaagccatgttctagggcttattctcatgattggaccgagtgtgcttttgttcatccgggagaaaatgcgaggaggagagatccgaggaagtatccttacacttgtgtcccctgtcccgagttccgtaaaggatcatgcccgaaaggagattcttgcgagtatgctcacggggttttcgagtcgtggcttcaccccgcgcagtataaaacccggctttgtaaagatgaaacgggttgtgcaaggaaagtttgtttctttgctcataaacgcgaagagatgagacctgttaatgcttcaactggctctgccgtggctcagtctccgtttagcagcttggagatgatgccagggttgtctcctcttgcttattcttcaggagtttcgactcctccggtttctccaatggctaatggtgttccttcctctccaagaaacggcggatcatggcagaacagagtcaatacccttactccaccggctttgcagctcaatggtggaagcagattgaagtccacactgagcgctagagatatcgatatggagatggagatggaattgagactccgcggttttggcaacaatgtggaagagacgttcgggtcttatgtttcctctccaagtaggaattctcaaatgggtcaaaacatgaaccaacattatccatcttccccggtgagacaaccgccatctcaacacgggttcgaatcttcagcagctgcagcggttgcagtgatgaaagcgagatcaaccgcctttgcgaaacgtagcttgagcttcaaaccagctactcaagcagcaccacagtcgaatctctcggattggggatctccaaacgggaagctggaatggggaatgaaaggagaagagctgaataagatgagaagaagtgtttcctttggaatccatggaaacaacaacaataacgcagctagagactacagggacgagccagatgtgtcatgggttaactctttagttaaagacagtactgtggtgtctgagagaagctttggaatgaatgagagggttcggataatgtcgtgggctgagcaaatgtacagagagaaggagcagactgtggtgtaaacacacacaaagatggtttcttatatatattgcttttgggccatctctgcaaatttgattctttaatttttgtgactttctttagttgttactgttattagtagtatatggtttgttgtcactacgagtctacgtgatgaaaagatagaagttaattgcattagtttctatattcgtttctcatcctcttgtaatttatcaaaccatgaaatggctaagcaatccaaaccgaaaaaaaaaaaaaaa

SEQ ID NO: 54 - DNA, 2193 bp, Oryza sativa
aatccgaaaagtttctgcaccgttttcaccccctaactaacaatatagggaacgtgtgctaaatataaaatgagaccttatatatgtagcgctgataactagaactatgcaagaaaaactcatccacctactttagtggcaatcgggctaaataaaaaagagtcgctacactagtttcgttttccttagtaattaagtgggaaaatgaaatcattattgcttagaatatacgttcacatctctgtcatgaagttaaattattcgaggtagccataattgtcatcaaactcttcttgaataaaaaaatctttctagctgaactcaatgggtaaagagagagattttttttaaaaaaatagaatgaagatattctgaacgtattggcaaagatttaaacatataattatataattttatagtttgtgcattcgtcatatcgcacatcattaaggacatgtcttactccatcccaatttttatttagtaattaaagacaattgacttatttttattatttatcttttttcgattagatgcaaggtacttacgcacacactttgtgctcatgtgcatgtgtgagtgcacctcctcaatacacgttcaactagcaacacatctctaatatcactcgcctatttaatacatttaggtagcaatatctgaattcaagcactccaccatcaccagaccacttttaataatatctaaaatacaaaaaataattttacagaatagcatgaaaagtatgaaacgaactatttaggtttttcacatacaaaaaaaaaaagaattttgctcgtgcgcgagcgccaatctcccatattgggcacacaggcaacaacagagtggctgcccacagaacaacccacaaaaaacgatgatctaacggaggacagcaagtccgcaacaaccttttaacagcaggctttgcggccaggagagaggaggagaggcaaagaaaaccaagcatcctcctcctcccatctataaattcctccccccttttcccctctctatataggaggcatccaagccaagaagagggagagcaccaaggacacgcgactagcagaagccgagcgaccgccttcttcgatccatatcttccggtcgagttcttggtcgatctcttccctcctccacctcctcctcacagggtatgtgcccttcggttgttcttggatttattgttctaggttgtgtagtacgggcgttgatgttaggaaaggggatctgtatctgtgatgattcctgttcttggatttgggatagaggggttcttgatgttgcatgttatcggttcggtttgattagtagtatggttttcaatcgtctggagagctctatggaaatgaaatggtttagggtacggaatcttgcgattttgtgagtaccttttgtttgaggtaaaatcagagcaccggtgattttgcttggtgtaataaaagtacggttgtttggtcctcgattctggtagtgatgcttctcgatttgacgaagctatcctttgtttattccctattgaacaaaaataatccaactttgaagacggtcccgttgatgagattgaatgattgattcttaagcctgtccaaaatttcgcagctggcttgtttagatacagtagtccccatcacgaaattcatggaaacagttataatcctcaggaacaggggattccctgttcttccgatttgctttagtcccagaattttttttcccaaatatcttaaaaagtcactttctggttcagttcaatgaattgattgctacaaataatgcttttatagcgttatcctagctgtagttcagttaataggtaatacccctatagtttagtcaggagaagaacttatccgatttctgatctccatttttaattatatgaaatgaactgtagcataagcagtattcatttggattattttttttattagctctcaccccttcattattctgagctgaaagtctggcatgaactgtcctcaattttgttttcaaattcacatcgattatctatgcattatcctcttgtatctacctgtagaagtttctttttggttattccttgactgcttgattacagaaagaaatttatgaagctgtaatcgggatagttatactgcttgttcttatgattcatttcctttgtgcagttcttggtgtagcttgccactttcaccagcaaagttc

SEQ ID NO: 55 - DNA, 1827 bp, Oryza sativa
gcttgagtcatagggagaaaacaaatcgatcatatttgactcttttccctccatctctcttaccggcaaaaaaagtagtactggtttatatgtaaagtaagattctttaattatgtgagatccggcttaatgcttttcttttgtcacatatactgcattgcaacaattgccatatattcacttctgccatcccattatatagcaactcaagaatggattgatatatcccctattactaatctagacatgttaaggctgagttgggcagtccatcttcccaacccaccaccttcgtttttcgcgcacatacttttcaaactactaaatggtgtgttttttaaaaatattttcaatacaaaagttgctttaaaaaattatattgatccatttttttaaaaaaaatagctaatacttaattaatcacgtgttaaaagaccgctccgttttgcgtgcaggagggataggttcacatcctgcattaccgaacacagcctaaatcttgttgtctagattcgtagtactggatatattaaatcatgttctaagttactatatactgagatgaatagaataagtaaaattagacccaccttaagtcttgatgaagttactactagctgcgtttgggaggacttcccaaaaaaaaaagtattagccattagcacgtgattaattaagtactagtttaaaaaacttaaaaaataaattaatatgattctcttaagtaactctcctatagaaaacttttacaaaattacaccgtttaatagtttggaaaatatgtcagtaaaaaataagagagtagaagttatgaaagttagaaaaagaattgttttagtagtatacagttataaactattccctctgttctaaaacataagggattatggatggattcgacatgtaccagtaccatgaatcgaatccagacaagttttttatgcatatttattctactataatatatcacatctgctctaaatatcttatatttcgaggtggagactgtcgctatgtttttctgcccgttgctaagcacacgccacccccgatgcggggacgcctctggccttcttgccacgataattgaatggaacttccacattcagattcgataggtgaccgtcgactccaagtgctttgcacaaaacaactccggcctcccggccaccagtcacacgactcacggcactaccacccctgactccctgaggcggacctgccactgttctgcatgcgaagctatctaaaattctgaagcaaagaaagcacagcacatgctccgggacacgcgccacccggcggaaaagggctcggtgtggcgatctcacagccgcatatcgcatttcacaagccgcccatctccaccggcttcacgaggctcatcgcggcacgaccgcgcacggaacgcacgcggccgacccgcgcgcctcgatgcgcgagcccatccgccgcgtcctccctttgcctttgccgctatcctctcggtcgtatcccgtttctctgtcttttgctccccggcgcgcgccagttcggagtaccagcgaaacccggacacctggtacacctccgccggccacaacgcgtgtccccctacgtggccgcgcagcacatgcccatgcgcgacacgtgcacctcctcatccaaactctcaagtctcaacggtcctataaatgcacggatagcctcaagctgctcgtcacaaggcaagaggcaagaggcaagagcatccgtattaaccagccttttgagacttgagagtgtgtgtgactcgatccagcgtagtttcagttcgtgtgttggtgagtgattccagccaagtttgcg

SEQ ID NO: 56 - DNA, 2194 bp, Oryza sativa
aatccgaaaagtttctgcaccgttttcaccccctaactaacaatatagggaacgtgtgctaaatataaaatgagaccttatatatgtagcgctgataactagaactatgcaagaaaaactcatccacctactttagtggcaatcgggctaaataaaaaagagtcgctacactagtttcgttttccttagtaattaagtgggaaaatgaaatcattattgcttagaatatacgttcacatctctgtcatgaagttaaattattcgaggtagccataattgtcatcaaactcttcttgaataaaaaaatctttctagctgaactcaatgggtaaagagagagattttttttaaaaaaatagaatgaagatattctgaacgtattggcaaagatttaaacatataattatataattttatagtttgtgcattcgtcatatcgcacatcattaaggacatgtcttactccatcccaatttttatttagtaattaaagacaattgacttatttttattatttatcttttttcgattagatgcaaggtacttacgcacacactttgtgctcatgtgcatgtgtgagtgcacctcctcaatacacgttcaactagcaacacatctctaatatcactcgcctatttaatacatttaggtagcaatatctgaattcaagcactccaccatcaccagaccacttttaataatatctaaaatacaaaaaataattttacagaatagcatgaaaagtatgaaacgaactatttaggtttttcacatacaaaaaaaaaaagaattttgctcgtgcgcgagcgccaatctcccatattgggcacacaggcaacaacagagtggctgcccacagaacaacccacaaaaaacgatgatctaacggaggacagcaagtccgcaacaaccttttaacagcaggctttgcggccaggagagaggaggagaggcaaagaaaaccaagcatcctccttctcccatctataaattcctccccccttttcccctctctatataggaggcatccaagccaagaagagggagagcaccaaggacacgcgactagcagaagccgagcgaccgccttctcgatccatatcttccggtcgagttcttggtcgatctcttccctcctccacctcctcctcacagggtatgtgcctcccttcggttgttcttggatttattgttctaggttgtgtagtacgggcgttgatgttaggaaaggggatctgtatctgtgatgattcctgttcttggatttgggatagaggggttcttgatgttgcatgttatcggttcggtttgattagtagtatggttttcaatcgtctggagagctctatggaaatgaaatggtttagggatcggaatcttgcgattttgtgagtaccttttgtttgaggtaaaatcagagcaccggtgattttgcttggtgtaataaagtacggttgtttggtcctcgattctggtagtgatgcttctcgatttgacgaagctatcctttgtttattccctattgaacaaaaataatccaactttgaagacggtcccgttgatgagattgaatgattgattcttaagcctgtccaaaatttcgcagctggcttgtttagatacagtagtccccatcacgaaattcatggaaacagttataatcctcaggaacaggggattccctgttcttccgatttgctttagtcccagaattttttttcccaaatatcttaaaaagtcactttctggttcagttcaatgaattgattgctacaaataatgcttttatagcgttatcctagctgtagttcagttaataggtaatacccctatagtttagtcaggagaagaacttatccgatttctgatctccatttttaattatatgaaatgaactgtagcataagcagtattcatttggattattttttttattagctctcaccccttcattattctgagctgaaagtctggcatgaactgtcctcaattttgttttcaaattcacatcgattatctatgcattatcctcttgtatctacctgtagaagtttctttttggttattccttgactgcttgattacagaaagaaatttatgaagctgtaatcgggatagttatactgcttgttcttatgattcatttcctttgtgcagttcttggtgtagcttgccactttcaccagcaaagttc

SEQ ID NO: 57 - protein, 46 aa, Artificial sequence
  SNH domain
  VARIANT (3)..(3): Xaa is Lys or Gln
  UNSURE (4)..(4): Xaa can be any naturally occurring amino acid
  VARIANT (6)..(6): Xaa is Glu or Asp
  VARIANT (7)..(7): Xaa is Asp or Glu
  VARIANT (9)..(9): Xaa is Asn or Lys
  UNSURE (10)..(10): Xaa can be any naturally occurring amino acid
  UNSURE (13)..(13): Xaa can be any naturally occurring amino acid
  VARIANT (14)..(14): Xaa is Ala, Lys, or Cys
  VARIANT (16)..(16): Xaa is Val, Met, or Leu
  VARIANT (17)..(17): Xaa is Asp, Ser, or Glu
  VARIANT (18)..(18): Xaa is Asn or Ser
  VARIANT (19)..(19): Xaa is Leu or Gln
  UNSURE (21)..(21): Xaa can be any naturally occurring amino acid
  VARIANT (23)..(23): Xaa is Arg or Lys
  UNSURE (24)..(25): Xaa can be any naturally occurring amino acid
  VARIANT (28)..(28): Xaa is Asp, Ser, or Ala
  UNSURE (29)..(30): Xaa can be any naturally occurring amino acid
  VARIANT (32)..(32): Xaa is Ser, Gln, or Ala
  UNSURE (33)..(33): Xaa can be any naturally occurring amino acid
  VARIANT (35)..(35): Xaa is His or Gln
  UNSURE (36)..(36): Xaa can be any naturally occurring amino acid
  VARIANT (39)..(39): Xaa is Leu, Val, or Met
  VARIANT (43)..(43): Xaa is Thr or Ala
IQXXLXXNXXLIXXIXXXXNXGXXXECXXXQXXLXXNLXYLAXIAD

SEQ ID NO: 58 - protein, 46 aa, Arabidopsis thaliana
IQQYLDENKSLILKIVESQNSGKLSECAENQARLQRNLMYLAAIAD

SEQ ID NO: 59 - DNA, 633 bp, Arabidopsis thaliana
atgcaacagcacctgatgcagatgcagcccatgatggctggttactaccccagcaatgttacctctgatcatatccaacagtacttggacgaaaacaaatcgttgattctgaagattgttgagtctcaaaactctggaaagcttagcgaatgcgccgagaatcaagcaaggcttcaacgcaacctaatgtacctagctgcaatagcagattctcagcctcagccaccaagtgtgcatagccagtatggatctgctggtggtgggatgattcagggagaaggagggtcacactatttgcagcagcaacaagcgactcaacagcaacagatgactcagcagtctctaatggcggctcgatcttcaatgttgtatgctcagcaacagcagcagcagcagccttacgcgacgcttcagcatcagcaattgcaccatagccagcttggaatgagctcgagcagcggaggaggaggaagcagtggtctccatatccttcagggagaggctggtgggtttcatgattttggccgtgggaagccggaaatgggaagtggtggtggcggtgaaggcagaggaggaagttcaggggatggtggagaaaccctttacttgaaatcatcagatgatgggaattga

SEQ ID NO: 60 - protein, 210 aa, Arabidopsis thaliana
MQQHLMQMQPMMAGYYPSNVTSDHIQQYLDENKSLILKIVESQNSGKLSECAENQARLQRNLMYLAAIADSQPQPPSVHSQYGSAGGGMIQGEGGSHYLQQQQATQQQQMTQQSLMAARSSMLYAQQQQQQQPYATLQHQQLHHSQLGMSSSSGGGGSSGLHILQGEAGGFHDFGRGKPEMGSGGGGEGRGGSSGDGGETLYLKSSDDGN

SEQ ID NO: 61 - DNA, 588 bp, Arabidopsis thaliana
atgcagcagcagcagtctccgcaaatgtttccgatggttccgtcgattccccctgctaacaacatcactaccgaacagatccaaaagtaccttgatgagaacaagaagctgattatggccatcatggaaaaccagaatctcggtaaacttgctgagtgcgcccagtaccaagctcttctccagaagaacttgatgtatcttgctgcaattgctgatgctcaacccccaccacctacgccaggaccttcaccatctacagctgtcgctgcccagatggcaacaccgcattctgggatgcaaccacctagctacttcatgcaacacccacaagcatcccctgcagggattttcgctccaaggggtcctttacagtttggtagcccactccagtttcaggatccgcaacagcagcagcagatacatcagcaagctatgcaaggacacatggggattagaccaatgggtatgaccaacaacgggatgcagcatgcgatgcaacaaccagaaaccggtcttggaggaaacgtggggcttagaggaggaaagcaagatggagcagatggacaaggaaaagatgatggcaagtga

SEQ ID NO: 62 - protein, 195 aa, Arabidopsis thaliana
MQQQQSPQMFPMVPSIPPANNITTEQIQKYLDENKKLIMAIMENQNLGKLAECAQYQALLQKNLMYLAAIADAQPPPPTPGPSPSTAVAAQMATPHSGMQPPSYFMQHPQASPAGIFAPRGPLQFGSPLQFQDPQQQQQIHQQAMQGHMGIRPMGMTNNGMQHAMQQPETGLGGNVGLRGGKQDGADGQGKDDGK

SEQ ID NO: 63 - DNA, 672 bp, Arabidopsis thaliana
atgcagcaatctccacagatgattccgatggttcttccttcatttccgcccaccaataatatcaccaccgaacagatccaaaagtatcttgatgagaacaagaagctgataatggcgatcttggaaaatcagaacctcggtaaacttgcagaatgtgctcagtatcaagctcttctccagaagaatttgatgtatctcgctgcaattgcggatgctcaacctcagccaccagcagctacactaacatcaggagccatgactccccaagcaatggctcctaatccgtcatcaatgcagccaccaccaagctacttcatgcagcaacatcaagctgtgggaatggctcaacaaatacctcctgggattttccctcctagaggtccattgcaatttggtagcccgcatcagtttctggatccgcagcaacagttacatcaacaagctatgcaagggcacatggggattagaccaatgggtttgaataataacaacggactgcaacatcaaatgcaccaccatgaaactgctcttgccgcaaacaatgcgggtcctaacgatgctagtggaggaggtaaaccggatgggaccaatatgagccagagtggagctgatgggcaaggtggctcagccgctagacatggcggtggtgatgcaaaaactgaaggaaaatga

SEQ ID NO: 64 - protein, 223 aa, Arabidopsis thaliana
MQQSPQMIPMVLPSFPPTNNITTEQIQKYLDENKKLIMAILENQNLGKLAECAQYQALLQKNLMYLAAIADAQPQPPAATLTSGAMTPQAMAPNPSSMQPPPSYFMQQHQAVGMAQQIPPGIFPPRGPLQFGSPHQFLDPQQQLHQQAMQGHMGIRPMGLNNNNGLQHQMHHHETALAANNAGPNDASGGGKPDGTNMSQSGADGQGGSAARHGGGDAKTEGK

SEQ ID NO: 65 - DNA, 633 bp, Aspergillus officinalis
atgcagcagcacctgatgcagatgcagcccatgatggcaacctacggttcaccgaatcaggtcaccaccgatatcattcagcagtatctggacgagaacaagcagttgattctggctattcttgaaaaccaaaattcaggaaaagctgatgaatgtgctgagaatcaggctaagcttcagaggaatctgatgtatcttgcagccattgcggatagccagccccaagttcctaccattgctcagtatcctcccaacgctgttgctgctatgcaatcgagtgctcgctacatgcaacaacaccaagcagctcaacagatgacccctcaatctctcatggctgctcgctcctcaatgctctactcacagtccccaatgtctgcactccagcagcaacagcagcaagcagcaatgcatagccagctcgccatgagctccggaggcaacaacagcagcaccggaggattcaccattcttcatggtgaagctagcataggaggcaatggctcaatgaattctggtggagtctttggagattttggacggagcagcggtgggaagcaagagactgggagcgaagggcacgggacagagactcctatgtacctgaaaggctctgaagaagaaggaaactga

SEQ ID NO: 66 - protein, 210 aa, Aspergillus officinalis
MQQHLMQMQPMMATYGSPNQVTTDIIQQYLDENKQLILAILENQNSGKADECAENQAKLQRNLMYLAAIADSQPQVPTIAQYPPNAVAAMQSSARYMQQHQAAQQMTPQSLMAARSSMLYSQSPMSALQQQQQQAAMHSQLAMSSGGNNSSTGGFTILHGEASIGGNGSMNSGGVFGDFGRSSGGKQETGSEGHGTETPMYLKGSEEEGN

SEQ ID NO: 67 - DNA, 591 bp, Brassica napus
atgcagcccatgatggctggttactaccccagcaatgtcacctctgatcatatccagcagtacttggatgagaacaagtctttgattctgaagatagttgagtctcaaaactcaggaaagctcagcgagtgtgccgagaatcaggcaaggcttcaacgcaacctcatgtacttggctgcaatagcagattctcagcctcaacctccaagcgtgcatagccagtatggatctgctggtggtgggttgattcagggagaaggagcgtcacactatttgcagcagcaacaggcgactcaacagcagcagatgactcagcagtctcttatggcagctcgttcttcaatgatgtatcagcagcagcaacagccttatgcaacgcttcagcatcagcagttgcaccatagccagcttgggatgagctctagcagcggaggaggaagcagtggtctccatatccttcagggagaggctggtgggtttcatgaatttggccgtgggaagccggagatgggaagtggtgaaggcaggggtggaagctcaggggatggtggagaaacactctacttgaagtcatcagatgatgggaactga

SEQ ID NO: 68 - protein, 203 aa, Brassica napus
MQQHLMQMQPMMAGYYPSNVTSDHIQQYLDENKSLILKIVESQNSGKLSECAENQARLQRNLMYLAAIADSQPQPPSVHSQYGSAGGGLIQGEGASHYLQQQQATQQQQMTQQSLMAARSSMMYQQQQQPYATLQHQQLHHSQLGMSSSSGGGSSGLHILQGEAGGFHEFGRGKPEMGSGEGRGGSSGDGGETLYLKSSDDGN

SEQ ID NO: 69 - DNA, 663 bp, Citrus sinensis
atgcaacagcacctgatgcagatgcagcccatgatggcagcttattatcccaacaacgtcactactgaccacattcaacagtatctagatgagaacaaatcattgattttgaagattgttgagagccagaattcagggaaactgagcgagtgtgcagagaaccaggcaagattgcagcggaatctcatgtacctggctgctattgctgatgctcaaccccaaccacctagcgttcatgcccagttctcttctggtggcattatgcagccaggagctcactatatgcaacaccagcaatctcagccaatgacaccacagtcacttatggctgcacgctcatccatggtgtactctcaacagcaattttcagtgcttcagcaacagcaagccttgcatggtcagcttggcatgagctctggtggtagctcaggacttcacatgctgcaaagtgagggtagtactgcaggaggtagtggttcacttgggggtgggggattccctgattttggccgtggctcatctggtgaaggcttgcactcaaggggaatggggagcaagcatgatataggcagttctggatctgctgaaggacgaggagggagctcaggaagccaagatggaggcgaaactctctacttgaaaggggctgatgatggaaattaa

SEQ ID NO: 70 - protein, 219 aa, Citrus sinensis
MQQHLMQMQPMMAAYYPNNVTTDHIQQYLDENKSLILKIVESQNSGKLSECAENQARLQRNLMYLAAIADAQPQPPSVHAQFSSGGIMQPGAHYMQHQQSQPMTPQSLMAARSSMVYSQQQFSVLQQQQALHGQLGMSSGGSSGLHMLQSEGSTAGGSGSLGGGGFPDFGRGSSGEGLHSRGMGSKHDIGSSGSAEGRGGSSGSQDGGETLYLKGADDG

SEQ ID NO: 71 - DNA, 660 bp, Gossypium arboreum
  misc_feature (309)..(309): n is a, c, g, or t
atgcagcagcacctgatgcagatgcagcccatgatggcagcttattatcccaacaacgtcactactgatcatattcaacagtatctcgatgagaacaagtcattgatcttaaagattgttgagagccagaattctgggaaattgagtgaatgtgctgagaaccaagcaaggctgcagcgaaacctcatgtacctggctgccattgcggattctcaaccccaaccacccaccgtgcatgcacagtttccatctggtggtatcatgcagcaaggagctgggcactacatgcagcaccaacaagctcaacanatgacacaacagtcgcttatggctgctcggtcctcaatgttgtattctcagcaaccattttctgcactgcaacaacaacaacaacaaggctttgcacagtcagcttggcatgagctctggcgggagcacaggcctttcatatgctgcaaactgaatctagtactgcagggggcagtgagacaccttgggcccgagggttgtcctgatttggacgggggtcttttggagaggcatccctggtggcaggccaatggccgggggaacaaccaaaaatccggggaggccggctcacctaagggccgggaggagcccttggggcaggggggggtgatggggggaacctcttcttaa

SEQ ID NO: 72 - protein, 219 aa, Gossypium arboreum
  UNSURE (103)..(103): Xaa can be any naturally occurring amino acid
MQQHLMQMQPMMAAYYPNNVTTDHIQQYLDENKSLILKIVESQNSGKLSECAENQARLQRNLMYLAAIADSQPQPPTVHAQFPSGGIMQQGAGHYMQHQQAQXMTQQSLMAARSSMLYSQQPFSALQQQQQQGFAQSAWHELWREHRPFICCKLNLVLQGAVRHLGPEGCPDLDGGLLERHPWWQANGRGNNQKSGEAGSPKGREEPLGQGGVMGGTSS

SEQ ID NO: 73 - DNA, 636 bp, Medicago trunculata
atgcagcagcacctgatgcagatgcagcccatgatggcagcttactatcctaacaacgtcactactgatcatattcaacagtatcttgatgagaacaagtccttgattctcaagattgttgaaagccagaacactggcaagctcaccgagtgtgctgagaaccaatcaaggcttcagagaaatctcatgtacctagctgcaatagctgattctcaaccccaaccacctactatgcctggccagtacccttcaagtggaatgatgcagcagggaggacactacatgcaggctcaacaagctcagcagatgacacaacaacaattaatggctgcacgttcctctcttatgtatgctcaacagcttcaacagcagcaagccttgcaaagccaacttggtatgaattccagtggaagtcaaggccttcacatgttgcatagtgaaggggctaatgttggaggcaattcatctctaggggctggttttcctgattttggccgtagctcagccggtgatggtttgcacggcagtggtaagcaagacattggaagcactgatggccgcggtggaagctctagtggtcactctggtgatggcggcgaaacactttacctgaaatcttctggtgatgggaattag

SEQ ID NO: 74 - protein, 211 aa, Medicago trunculata
MQQHLMQMQPMMAAYYPNNVTTDHIQQYLDENKSLILKIVESQNTGKLTECAENQSRLQRNLMYLAAIADSQPQPPTMPGQYPSSGMMQQGGHYMQAQQAQQMTQQQLMAARSSLMYAQQLQQQQALQSQLGMNSSGSQGLHMLHSEGANVGGNSSLGAGFPDFGRSSAGDGLHGSGKQDIGSTDGRGGSSSGHSGDGGETLYLKSSGDGN

SEQ ID NO: 75 - DNA, 684 bp, Oryza sativa
atgcagcagcaacacctgatgcagatgaaccagggcatgatggggggatatgcttcccctaccaccgtcaccactgatctcattcagcagtatctggatgagaacaagcagctgatcctggccatccttgacaaccagaacaatgggaaggtggaagagtgcgctcggaaccaagctaagctccagcacaatctcatgtacctcgccgccatcgccgacagccagccgccgcagacggccgccatgtcccagtatccgtcgaacctgatgatgcagtccggggcgaggtacatgccgcagcagtcggcgcagatgatggcgccgcagtcgctgatggcggcgaggtcttcgatgatgtacgcgcagccggcgctgtcgccgctccagcagcagcagcagcagcaggcggcggcggcgcacgggcagctgggcatgggctcggggggcaccaccagcgggttcagcatcctccacggcgaggccagcatgggcggcggcggcggcggcggtggcgccggtaacagcatgatgaacgccggcgtgttctccgacttcggacgcggcggcggcggcggcggcaaggaggggtccacctcgctgtccgtcgacgtccggggcgccaactccggcgcccagagcggcgacggggagtacctcaagggcaccgaggaggaaggcagctag

SEQ ID NO: 76 - protein, 227 aa, Oryza sativa
MQQQHLMQMNQGMMGGYASPTTVTTDLIQQYLDENKQLILAILDNQNNGKVEECARNQAKLQHNLMYLAAIADSQPPQTAAMSQYPSNLMMQSGARYMPQQSAQMMAPQSLMAARSSMMYAQPALSPLQQQQQQQAAAAHGQLGMGSGGTTSGFSILHGEASMGGGGGGGGAGNSMMNAGVFSDFGRGGGGGGKEGSTSLSVDVRGANSGAQSGDGEYLKGTEEEGS

SEQ ID NO: 77 - DNA, 558 bp, Oryza sativa
atgcagcagcagccgatgccgatgcccgcgcaggcgccgccgacggccggaatcaccaccgagcagatccaaaagtatctggatgaaaacaagcagcttattttggctattttggaaaatcagaatctgggaaagttggcagaatgtgctcagtatcaagcgcagcttcagaagaatctcttgtacttggctgcaattgctgatactcaaccgcagaccactataagccgtccccagatggtgccgcatggtgcatcgccggggttaggggggcaatacatgtcgcaggtgccaatgttcccccccaggacccctctaacgccccagcagatgcaggagcagcagctgcagcaacagcaagcccagctgctctcgttcggcggtcagatggttatgaggcctggcgttgtgaatggcattcctcagcttctgcaaggcgaaatgcaccgcggagcagatcaccagaacgctggcggggccacctcggagccttccgagagccacaggagcaccggcaccgaaaatgacggtggaagcgacttcggcgatcaatcctaa

SEQ ID NO: 78 - protein, 185 aa, Oryza sativa
MQQQPMPMPAQAPPTAGITTEQIQKYLDENKQLILAILENQNLGKLAECAQYQAQLQKNLLYLAAIADTQPQTTISRPQMVPHGASPGLGGQYMSQVPMFPPRTPLTPQQMQEQQLQQQQAQLLSFGGQMVMRPGVVNGIPQLLQGEMHRGADHQNAGGATSEPSESHRSTGTENDGGSDFGDQS

SEQ ID NO: 79 - DNA, 618 bp, Oryza sativa
atgcagcagcagatggccatgccggcgggggccgccgccgccgcggtgccgccggcggccggcatcaccaccgagcagatccaaaagtatttggatgaaaataaacagctaattttggccatcctggaaaatcaaaacctagggaagttggctgaatgtgctcagtaccaagctcagcttcaaaagaatctcttgtatctggctgccattgcagatgcccaaccacctcagaatccaggaagtcgccctcagatgatgcagcctggtgctaccccaggtgctgggcattacatgtcccaagtaccgatgttccctccaagaactcccttaaccccacaacagatgcaagagcagcagcagcagcaactccagcaacagcaagctcaggctctagccttccccggccagatgctaatgagaccaggtactgtcaatggcatgcaatctatcccagttgctgaccctgctcgcgcagccgatcttcagacggcagcaccgggctcggtagatggccgaggaaacaagcaggatgcaacctcggagccttccgggaccgagagccacaagagtgcgggagcagataacgacgcaggcggtgacatagcggagaagtcctga

SEQ ID NO: 80 - protein, 205 aa, Oryza sativa
MQQQMAMPAGAAAAAVPPAAGITTEQIQKYLDENKQLILAILENQNLGKLAECAQYQAQLQKNLLYLAAIADAQPPQNPGSRPQMMQPGATPGAGHYMSQVPMFPPRTPLTPQQMQEQQQQQLQQQQAQALAFPGQMLMRPGTVNGMQSIPVADPARAADLQTAAPGSVDGRGNKQDATSEPSGTESHKSAGADNDAGGDIAEKS

SEQ ID NO: 81 - DNA, 540 bp, Solanum tuberosum
atgcagcagcagcacctgatgcagatgcagcccatgatggcagcctattatcccaacaatgtcactactgatcatattcaacagttcctggatgagaacaaatcacttattctgaagattgttgagagccagaactctgggaaaataagtgaatgtgcagagtcccaagctaaacttcagagaaatcttatgtaccttgcagctattgctgattcacagccccagcctcctagtatgcattcacagttagcttctggtgggatgatgcagggaggggcacattatatgcagcaacaacaagctcaacaactcacaacgcaatcgcttatggctgcagcaagatcctcctcctcaatgctctatggacaacaacaacaacaacaacaacaacaactatcatcattgcaacaacagcaagcagcctttcatagccagcaactcggaatgagcagctctggtggaggaagcagtagtggacttcacatgctacaaagcgaaaacactcatagtgctagcactggtggtgggtggtttccctga

SEQ ID NO: 82 - protein, 179 aa, Solanum tuberosum
MQQQHLMQMQPMMAAYYPNNVTTDHIQQFLDENKSLILKIVESQNSGKISECAESQAKLQRNLMYLAAIADSQPQPPSMHSQLASGGMMQGGAHYMQQQQAQQLTTQSLMAAARSSSSMLYGQQQQQQQQQLSSLQQQQAAFHSQQLGMSSSGGGSSSGLHMLQSENTHSASTGGGWFP

SEQ ID NO: 83 - DNA, 684 bp, Zea mays
atgcagcagcaacacctgatgcagatgaaccagaacatgatggggggctacacctctcctgccgccgtgaccaccgatctcatccagcagcacctggacgagaacaagcagctgatcctggccatcctcgacaaccagaacaatggcaaggcggaggagtgcgaacggcaccaagctaagctccagcacaacctcatgtacctggccgccatcgctgacagccagccgccacagaccgcgccactatcacagtacccgtccaacctgatgatgcagccgggccctcggtacatgccaccgcagtccgggcagatgatgaacccgcagtcgctgatggcggcgcggtcctccatgatgtacgcgcacccgtccctgtcgccactccagcagcagcaggcggcgcacggacagctgggtatggctccagggggcggcggtggcggcacgaccagcgggttcagcatcctccacggcgaggccagcatgggcggtggtggtgctggcgcaggcgccggcaacaacatgatgaacgccggcatgttctcgggctttggccgcagcggcagtggcgccaaggaagggtcgacctctctgtcggttgacgtccggggtggaaccagctccggcgcgcagagcggggacggcgagtacctcaaagtcggcaccgaggaagaaggcagttag

SEQ ID NO: 84 - protein, 227 aa, Zea mays
MQQQHLMQMNQNMMGGYTSPAAVTTDLIQQHLDENKQLILAILDNQNNGKAEECERHQAKLQHNLMYLAAIADSQPPQTAPLSQYPSNLMMQPGPRYMPPQSGQMMNPQSLMAARSSMMYAHPSLSPLQQQQAAHGQLGMAPGGGGGGTTSGFSILHGEASMGGGGAGAGAGNNMMNAGMFSGFGRSGSGAKEGSTSLSVDVRGGTSSGAQSGDGEYLKVGTEEEGS

SEQ ID NO: 85 - DNA, 549 bp, Zea mays
atgcagcagccgatgcacatgcagccacaggcgccggcgataaccccagctgccggaatcagcacggagcagatccaaaagtatctggatgagaataagcagcttattttggctattttggaaaatcagaacctaggaaaattggcagaatgtgctcagtatcaatcacaacttcagaagaacctcttgtatctcgctgcaatcgcagatgctcaaccgcagactgctgtaagccgccctcagatggcgccgcctggtggatcgcctggagtagggcagtacatgtcacaggtgcctatgttcccaccgaggacacctcttacaccccagcagatgcaggagcagcagcttcagcagcagcaggctcagttgctaaacttcagtggccaaatggttgctagaccaggcatggtcaacggcatggctcagtccatgcaagctcagctaccaccgggtgtgaacaagcaggatgctggtggggtcgcctctgagccctcgggcaccgagagccacaggagcactggtggtgacgatggtggaagcgactag

SEQ ID NO: 86 - protein, 182 aa, Zea mays
MQQPMHMQPQAPAITPAAGISTEQIQKYLDENKQLILAILENQNLGKLAECAQYQSQLQKNLLYLAAIADAQPQTAVSRPQMAPPGGSPGVGQYMSQVPMFPPRTPLTPQQMQEQQLQQQQAQLLNFSGQMVARPGMVNGMAQSMQAQLPPGVNKQDAGGVASEPSGTESHRSTGGDDGGSD

SEQ ID NO: 87 - DNA, 1173 bp, Homo sapiens
atgggcggcaacatgtctgtggctttcgcggccccgaggcagcgaggcaagggggagatcactcccgctgcgattcagaagatgttggatgacaataaccatcttattcagtgtataatggactctcagaataaaggaaagacctcagagtgttctcagtatcagcagatgttgcacacaaacttggtataccttgctacaatagcagattctaatcaaaatatgcagtctcttttaccagcaccacccacacagaatatgcctatgggtcctggagggatgaatcagagcggccctcccccacctccacgctctcacaacatgccttcagatggaatggtaggtgggggtcctcctgcaccgcacatgcagaaccagatgaacggccagatgcctgggcctaaccatatgcctatgcagggacctggacccaatcaactcaatatgacaaacagttccatgaatatgccttcaagtagccatggatccatgggaggttacaaccattctgtgccatcatcacagagcatgccagtacagaatcagatgacaatgagtcagggacaaccaatgggaaactatggtcccagaccaaatatgagtatgcagccaaaccaaggtccaatgatgcatcagcagcctccttctcagcaatacaatatgccacagggaggcggacagcattaccaaggacagcagccacctatgggaatgatgggtcaagttaaccaaggcaatcatatgatgggtcagagacagattcctccctatagacctcctcaacagggcccaccacagcagtactcaggccaggaagactattacggggaccaatacagtcatggtggacaaggtcctccagaaggcatgaaccagcaatattaccctgatggaaattcacagtatggccaacagcaagatgcataccagggaccacctccacaacagggatatccaccccagcagcagcagtacccagggcagcaaggttacccaggacagcagcagggctacggtccttcacagggtggtccaggtcctcagtatcctaactacccacagggacaaggtcagcagtatggaggatatagaccaacacagcctggaccaccacagccaccccagcagaggccttatggatatgaccagggacagtatggaaattaccagcag

SEQ ID NO: 88 - protein, 391 aa, Homo sapiens
MGGNMSVAFAAPRQRGKGEITPAAIQKMLDDNNHLIQCIMDSQNKGKTSECSQYQQMLHTNLVYLATIADSNQNMQSLLPAPPTQNMPMGPGGMNQSGPPPPPRSHNMPSDGMVGGGPPAPHMQNQMNGQMPGPNHMPMQGPGPNQLNMTNSSMNMPSSSHGSMGGYNHSVPSSQSMPVQNQMTMSQGQPMGNYGPRPNMSMQPNQGPMMHQQPPSQQYNMPQGGGQHYQGQQPPMGMMGQVNQGNHMMGQRQIPPYRPPQQGPPQQYSGQEDYYGDQYSHGGQGPPEGMNQQYYPDGNSQYGQQQDAYQGPPPQQGYPPQQQQYPGQQGYPGQQQGYGPSQGGPGPQYPNYPQGQGQQYGGYRPTQPGPPQPPQQRPYGYDQGQYGNYQQ

SEQ ID NO: 89 - DNA, 627 bp, Allium cepa
atgcagcagccgcagccagcgatgggaaccatgggctcggtgccacctactagcatcaccaccgaacagattcaaaggtacttggatgagaacaaacagttaatattggcaattttggataatcaaaatttaggaagactgaatgagtgtgctcaatatcaagctcagcttcaaaagaatctgctttacctggcagcaatagctgatgctcagcctcagtctcctgcggtgcgtctgcagatgatgcctcaaggtgcagctgccacgcctcaagctggaaaccaatttatgcagcagcagagccctaatttccctcccaaaacaggaatgcaatttactcctcaacaagtacaagaattgcagcagcaacagctacaacatcagccacatatgatgcctccatttcaaggtcaaatgggtatgagacctatgaatggaatgcaggcagcaatgcatgcagattcatctcttgcttataacactaacaataagcaagatgcaggaaacgcagcttatgaaaatactgctgccaacacagatggttccattcaaaagaaaacagcaaatgatgatttagacccttctgcagcaaaccctagaaggtctgaagatgccaaatcatcatga

SEQ ID NO: 90 - protein, 208 aa, Allium cepa
MQQPQPAMGTMGSVPPTSITTEQIQRYLDENKQLILAILDNQNLGRLNECAQYQAQLQKNLLYLAAIADAQPQSPAVRLQMMPQGAAATPQAGNQFMQQQSPNFPPKTGMQFTPQQVQELQQQQLQHQPHMMPPFQGQMGMRPMNGMQAAMHADSSLAYNTNNKQDAGNAAYENTAANTDGSIQKKTANDDLDPSAANPRRSEDAKSS

SEQ ID NO: 91 - DNA, 633 bp, Aquilegia formosa x Aquilegia pubescens
atgcaacacatgcagatgcagcccatgatgccaccttatagtgccaacagcgtcactactgatcatatccaacagtacttggatgaaaataaggcgttgattctgaagatacttgagaaccaaaattcgggaaaagttagtgaatgtgcagagaaccaagcaagacttcaacgaaatcttatgtatctggctgcaattgctgattctcaaccacagcctcccaatatgcatgctcagtactctaatgcgggtataccacctggtgcacattacctacaacaccaacaggcccaacagatgacacaacagtcgctcatggctgctcgatcaaatatgctgtatgctcagccaatcacaggaatgcagcaacagcaagcaatgcatagccagcttggcatgagctctggtggtaacagtggactccacatgatgcacaatgagggcagcatgggaggtagtggggcacttggaagctattctgattatggccgtggcagtggtggtggagtaactatcgctagcaaacaagatggtggaagtggttctggtgaaggacgaggtggaaactctggaggccaaagtgcagatggaggtgaatctctttacctgaaaaacagtgacgaagggaactaa

SEQ ID NO: 92 - protein, 210 aa, Aquilegia formosa x Aquilegia pubescens
MQHMQMQPMMPPYSANSVTTDHIQQYLDENKALILKILENQNSGKVSECAENQARLQRNLMYLAAIADSQPQPPNMHAQYSNAGIPPGAHYLQHQQAQQMTQQSLMAARSNMLYAQPITGMQQQQAMHSQLGMSSGGNSGLHMMHNEGSMGGSGALGSYSDYGRGSGGGVTIASKQDGGSGSGEGRGGNSGGQSADGGESLYLKNSDEGN

SEQ ID NO: 93 - DNA, 615 bp, Brachypodium distachyon
atgcagcaggcgatgtccatgtccccggggtcggccggcgcggtgccgcctccggccggcatcaccacagagcagatccaaaagtatttggatgaaaataagcaacttattttggccatcctggaaaatcagaacctaggaaagttgactgaatgtgctcagtatcaagctcaacttcagaagaatctcttgtatctggctgccattgcggatgcccaaccaccacagaaccctggaagtcgcccccagatggtgcagcctggtggtatgccaggtgcagggcattacatgtcgcaagtaccaatgttccctccaagaacccctttaaccccacaacagatgcaagagcaacagcaccagcagcttcagcagcagcaagcacaggctcttgctttccccagccagatggtcatgagaccaggtactgtgaacggcatgcagcctatgcaagctgatctccaagcagcagcagcagcacctggcctggcagacagccgaggaagtaagcaggacgcagcggtagctggggccatctcggaaccttctggcaccgagagtcacaagagtacaggagcggatcatgaggcaggtggcgatgtagctgagcaatcctaa

SEQ ID NO: 94 - protein, 204 aa, Brachypodium distachyon
MQQAMSMSPGSAGAVPPPAGITTEQIQKYLDENKQLILAILENQNLGKLTECAQYQAQLQKNLLYLAAIADAQPPQNPGSRPQMVQPGGMPGAGHYMSQVPMFPPRTPLTPQQMQEQQHQQLQQQQAQALAFPSQMVMRPGTVNGMQPMQADLQAAAAAPGLADSRGSKQDAAVAGAISEPSGTESHKSTGADHEAGGDVAEQS

SEQ ID NO: 95 - DNA, 636 bp, Brassica napus
atgcagcagcagcagcagcagcagcagcagcctccgcaaatgtttccgatggctccttcgatgccgccaactaacatcaccaccgaacagatccaaaagtaccttgaggagaacaagaagctgataatggcaatcatggaaaatcagaatcttggcaagcttgcagagtgtgcacagtaccaagctcttctccagaagaacttaatgtacctcgctgctattgctgatgctcaacctcctccatctaccgctggagctacaccaccaccagctatggcttcccagatgggggcaccgcatcctgggatgcaaccgccgagctactttatgcaacacccacaagcttcagggatggctcaacaagcaccacccgctggtatcttccctccgagaggtcctttgcagtttggtagcccacaccagcttcaggatccgcaacagcagcatatgcatcaacaggctatgcaaggacacatggggatgcgaccaatgggtatcaacaacaacaatgggatgcagcatcagatgcagcaacaacaaccagaaacctctcttggaggaagcgctgcaaacgtggggcttagaggtggaaagcaagatggagcagatggacaaggaaaagatgatggcaaatga

SEQ ID NO: 96 - protein, 203 aa, Brassica napus; identical to SEQ ID NO: 68

SEQ ID NO: 97 - DNA, 636 bp, Citrus sinensis
atgcagcagccaccgcaaatgatccctgttatgccttcatttccacccaccaacatcaccacagagcagattcaaaagtaccttgatgagaacaaaaagttgattttggcaattttggacaatcaaaatcttggaaagcttacagaatgtgcccactatcaagctcagcttcaaaagaatttaatgtatttagctgcaattgctgatgcacaaccacaagcaccaacaatgcctcctcagatggctccacatcctgcaatgcaagctagtgggtattacatgcaacatcctcaggcggcagcaatggctcagcaacaaggaatctttccccaaaagatgccattacaattcaataaccctcatcaactacaggatcctcaacagcagctacaccaacatcaagccatgcaagcacaaatgggaatgagaccgggtgccactaacaatggtatgcatcccatgcatgctgaaagctctcttggaggtggcagcagtggaggacccccttcagcatcaggcccaggtgacatacgtggtggaaataagcaagatgcctcggaggctgggactactggtgctgatggccagggcagttcggctggtgggcatggtggggatggagaggaggcaaagtga

SEQ ID NO: 98 - protein, 211 aa, Citrus sinensis
MQQPPQMIPVMPSFPPTNITTEQIQKYLDENKKLILAILDNQNLGKLTECAHYQAQLQKNLMYLAAIADAQPQAPTMPPQMAPHPAMQASGYYMQHPQAAAMAQQQGIFPQKMPLQFNNPHQLQDPQQQLHQHQAMQAQMGMRPGATNNGMHPMHAESSLGGGSSGGPPSASGPGDIRGGNKQDASEAGTTGADGQGSSAGGHGGDGEEAK

SEQ ID NO: 99 - DNA, 597 bp, Euphorbia esula
atgcagcagcaaccgcagatgatgcctatgatgccttcatatccaccagcaaacattaccacggagcaaatccaaaagtatcttgatgaaaataaaaaattgattttggcgatcttggataatcaaaatcttggaaaactcgctgagtgtgcacagtatcaagccctgctgcaaaaaaatctgatgtatttagccgcaattgctgatgcacaaccccagaccccacccatgccacctcagatgtccccacatccggctatgcaacaaggagcatattacatgcaacatcctcaggctgcagcagcagcaatggctcatcagtcgggtattttcccaccaaagatgtctccgttacaattcaataatcctcatcaaatacaggacccccagcagttacatcaagcagccctccaagggcaaatgggaatgaggcccatggggcccaataacgggatgcatccgatgcaccccgaggcaaatcttggaggatctaatgatggtcgtggaggaaacaaacaggatgctccggagacgggagcatcgggaggtgatgggcaaggcaattctggtggtgatggggctgaagatgggaaatga

SEQ ID NO: 100 - protein, 198 aa, Euphorbia esula
MQQQPQMMPMMPSYPPANITTEQIQKYLDENKKLILAILDNQNLGKLAECAQYQALLQKNLMYLAAIADAQPQTPPMPPQMSPHPAMQQGAYYMQHPQAAAAAMAHQSGIFPPKMSPLQFNNPHQIQDPQQLHQAALQGQMGMRPMGPNNGMHPMHPEANLGGSNDGRGGNKQDAPETGASGGDGQGNSGGDGAEDGK

SEQ ID NO: 101 - DNA, 642 bp, Glycine max
atgcagcagacaccgccaatgattcctatgatgccttctttcccacctacgaacataaccaccgagcagattcaaaaataccttgatgagaacaagaagctgattctggcaatattggacaatcaaaatcttggaaaacttgcagaatgtgcccagtaccaagctcagcttcaaaagaatttgatgtatttagctgcaattgctgatgcccagcctcaaaccccggccatgcctccgcagatggcaccgcaccctgccatgcaaccaggattctatatgcaacatcctcaggctgctgcagcagcaatggctcagcagcagcaaggaatgttcccccagaaaatgccattgcaatttggcaatccacatcaaatgcaggaacaacaacagcagctacaccagcaggccatccaaggtcaaatgggacttagacctggagatataaataatggcatgcatccaatgcacagtgaggctgctcttggaggtggaaacagcggtggtccaccttcggctactggtccaaacgatgcacgtggtggaagcaagcaagatgcctctgaggctggaacagctggtggagacggccaaggcagctccgcggctgctcataacagtggagatggtgaagaggcaaagtga

SEQ ID NO: 102 - protein, 213 aa, Glycine max
MQQTPPMIPMMPSFPPTNITTEQIQKYLDENKKLILAILDNQNLGKLAECAQYQAQLQKNLMYLAAIADAQPQTPAMPPQMAPHPAMQPGFYMQHPQAAAAAMAQQQQGMFPQKMPLQFGNPHQMQEQQQQLHQQAIQGQMGLRPGDINNGMHPMHSEAALGGGNSGGPPSATGPNDARGGSKQDASEAGTAGGDGQGSSAAAHNSGDGEEAK

SEQ ID NO: 103 - DNA, 633 bp, Glycine soya
atgcagcagacaccgcctatgattcctatgatgccttcgttcccacctacgaacataaccaccgagcagattcaaaaataccttgatgagaacaagaagctgattctggcaatattggacaatcaaaatcttggaaaacttgcagaatgtgcccagtaccaagctcagcttcaaaagaatttgatgtatttagctgcaattgctgatgcccagcctcaaacaccagccatgcctccacagatggcaccacaccctgccatgcaaccaggattctatatgcaacatcctcaggctgcagcagcagcaatggctcagcagcagcagcaaggaatgttcccccagaaaatgccattgcaatttggcaatccacatcaaatgcaggaacaacagcagcagctacaccagcaagccatccaaggtcaaatgggactgagacctggaggaataaataatggcatgcatccaatgcacaatgagggcggcaacagcggtggtccaccctcggctaccggtccgaacgacgcacgtggtggaagcaagcaagatgcttctgaggctggaacagctggtggagatggccaaggcagctctgcagctgctcataacagtggagatggtgaagaggcaaagtga

SEQ ID NO: 104 - protein, 210 aa, Glycine soya
MQQTPPMIPMMPSFPPTNITTEQIQKYLDENKKLILAILDNQNLGKLAECAQYQAQLQKNLMYLAAIADAQPQTPAMPPQMAPHPAMQPGFYMQHPQAAAAAMAQQQQQGMFPQKMPLQFGNPHQMQEQQQQLHQQAIQGQMGLRPGGINNGMHPMHNEGGNSGGPPSATGPNDARGGSKQDASEAGTAGGDGQGSSAAAHNSGDGEEAK

SEQ ID NO: 105 - DNA, 690 bp, Gossypium hirsutum
atgcagcagcacctgatgcagatgcagcccatgatggcagcttattatcccaacaacgtcactactgatcatattcaacagtatctcgatgagaacaagtcattgatcttaaagattgttgagagccagaattctgggaaattgagtgaatgtgctgagaaccaagcaaggctgcagcgaaacctcatgtacctggctgccattgcggattctcaaccccaaccacccaccgtgcatgcacagtttccatctggtggtatcatgcagccaggagctgggcactacatgcagcaccaacaagctcaacaaatgacacaacagtcgcttatggctgctcggtcctcaatgttgtattctcagcaaccattttctgcactgcaacaacaacagcagcaagctttgcacagtcagcttggcatgagctctggcggaagcacaggccttcatatgctgcaaactgaatctagtactgcaggtggcagtggagcacttggggccggagggtttcctgattttggacgtggttcttctggagaaggcatccatggtggcaggccaatggcaggtggaagcaagcaagatatcgggagtgccggctcagctgaaggtcgtggaggaagctctggtggtcagggtggtggtgatgggggtgaaaccctttacttaaaagcagccgatgatgggaactga

SEQ ID NO: 106 - protein, 229 aa, Gossypium hirsutum
MQQHLMQMQPMMAAYYPNNVTTDHIQQYLDENKSLILKIVESQNSGKLSECAENQARLQRNLMYLAAIADSQPQPPTVHAQFPSGGIMQPGAGHYMQHQQAQQMTQQSLMAARSSMLYSQQPFSALQQQQQQALHSQLGMSSGGSTGLHMLQTESSTAGGSGALGAGGFPDFGRGSSGEGIHGGRPMAGGSKQDIGSAGSAEGRGGSSGGQGGGDGGETLYLKAADDGN

SEQ ID NO: 107 - DNA, 642 bp, Gossypium hirsutum
atgccgcagccaccgcaaatgattcctgtgatgccttcatatccacctactaatatcactactgaacagattcagaagtaccttgatgagaataagaagttgattttggcaattttggacaatcagaatcttggaaaactcgctgaatgcgcccagtatcaagctcagctgcaaaagaatttgatgtatttagctgcaattgcggatgctcaacctcaatcaacgccagcaatgtcgcctcagatggcaccgcatccagcaatgcaacccggaggatattttatgcaacatcctcaagctgctgcaatgtcacagcaacctggcatgtaccctcaaaaggtgccattgcaattcaatagtccgcatcaaatgcaggaccctcagcacctcctatatcagcagcatcaacaagcaatgcaaggtcaaatgggaatcaggcctgggggacccaataatagcatgcatcccatgcattcagaggctagccttggaggcggcagcagtggtggtccccctcaaccttcaggcccaagtgatggacgtgctggaaacaagcaagagggctccgaagctggtggtaatgggcagggcagcacaactggtgggcatggtggcggtgatggagcggatgaggcaaagtga

SEQ ID NO: 108 - protein, 213 aa, Gossypium hirsutum
MPQPPQMIPVMPSYPPTNITTEQIQKYLDENKKLILAILDNQNLGKLAECAQYQAQLQKNLMYLAAIADAQPQSTPAMSPQMAPHPAMQPGGYFMQHPQAAAMSQQPGMYPQKVPLQFNSPHQMQDPQHLLYQQHQQAMQGQMGIRPGGPNNSMHPMHSEASLGGGSSGGPPQPSGPSDGRAGNKQEGSEAGGNGQGSTTGGHGGGDGADEAK

SEQ ID NO: 109 - DNA, 561 bp, Hordeum vulgare
atgcagcaagcgatgcccatgccgccggcggcggcggcgcctgggatgcctccttctgccggcctcagcaccgagcagatccaaaagtacctggatgaaaataaacaactaattttggctatcttggaaaatcagaacctgggaaagttggcggaatgtgctcagtatcaagctcagcttcagaagaatcttttgtatttggctgcgattgctgatactcagccacagacctctgtaagccgtcctcagatggcaccacctgctgcatccccaggggcagggcattacatgtcacaggtgccaatgttccctccgaggacccctctaacgcctcagcagatgcaggagcagcaactacagcaacaacaggctcagatgcttccgtttgctggtcaaatggttgcgagacccggggctgtcaatggcattccccaggcccctcaagttgaacaaccagcctatgcagcaggtggggccagttccgagccttctggcaccgagagccacaggagcactggcgccgataacgatggtgggagcggcttggctgaccagtcctaa

SEQ ID NO: 110 - protein, 186 aa, Hordeum vulgare
MQQAMPMPPAAAAPGMPPSAGLSTEQIQKYLDENKQLILAILENQNLGKLAECAQYQAQLQKNLLYLAAIADTQPQTSVSRPQMAPPAASPGAGHYMSQVPMFPPRTPLTPQQMQEQQLQQQQAQMLPFAGQMVARPGAVNGIPQAPQVEQPAYAAGGASSEPSGTESHRSTGADNDGGSGLADQS

SEQ ID NO: 111 - DNA, 555 bp, Lactuca serriola
  misc_feature (253)..(253): n is a, c, g, or t
atgaagcagccgatgatgccgaatccaatgatgtcttcttcgtttcctcctacaaacatcaccaccgatcagatccaaaagttccttgatgaaaacaagcaactaattatagcaataatgagcaacctaaatcttggaaagcttgctgaatgtgcccagtaccaagctctactccaaaaaaatttgatgtatctagcagccattgcagatgctcaaccacctacacctacaccaacactaaatatctcttatnagatgggcccggttccacatccagggatgccacagcaaggtggattttacatggcgcagcagcaccctcaggcggctgtaatgacggctcagccaccttctggttttccacaaccgatgcctggtatgcaatttaacagcccacaggctattcaagggcagatgggcgggaggtccggtgggccgccaagctcagccgctagtgatgtctggagaggaagcatgcaagatggtggtggtggtgctgctgctgatggtggtaaggatggtcatgctggcggtggacctgaggaagcaaagtaa

SEQ ID NO: 112 - protein, 184 aa, Lactuca serriola
  UNSURE (85)..(85): Xaa can be any naturally occurring amino acid
MKQPMMPNPMMSSSFPPTNITTDQIQKFLDENKQLIIAIMSNLNLGKLAECAQYQALLQKNLMYLAAIADAQPPTPTPTLNISYXMGPVPHPGMPQQGGFYMAQQHPQAAVMTAQPPSGFPQPMPGMQFNSPQAIQGQMGGRSGGPPSSAASDVWRGSMQDGGGGAAADGGKDGHAGGGPEEAK

SEQ ID NO: 113 - DNA, 627 bp, Lycopersicon esculentum
atgcagcagcacctgatgcagatgcagcccatgatggcagcttactatccaacgaacgtcactactgaccatattcaacagtatttggatgaaaacaaatcactcattctgaagattgttgagagccagaactctgggaaactcagtgaatgtgcggagaaccaagctaggcttcagaggaatctgatgtaccttgctgcgattgctgattcacaacctcaaccttctagcatgcattctcagttctcttctggtgggatgatgcagccagggacacacagttacttgcagcagcagcagcagcaacaacaagcgcaacaaatggcaacacaacaactcatggctgcaagatcctcgtcgatgctctatggacaacagcagcagcaatctcagttatcgcaatatcaacaaggcttgcatagtagccaactcggcatgagttctggcagtggcggaagcactggacttcatcacatgcttcaaagtgaatcatcacctcatggtggtggtttctctcatgacttcggccgcgcaaataagcaagacattgggagtagtatgtctgctgaagggcgcggcggaagttcaggtggtgagaatctttatctgaaagcttctgaggattga

SEQ ID NO: 114 - protein, 208 aa, Lycopersicon esculentum
MQQHLMQMQPMMAAYYPTNVTTDHIQQYLDENKSLILKIVESQNSGKLSECAENQARLQRNLMYLAAIADSQPQPSSMHSQFSSGGMMQPGTHSYLQQQQQQQQAQQMATQQLMAARSSSMLYGQQQQQSQLSQYQQGLHSSQLGMSSGSGGSTGLHHMLQSESSPHGGGFSHDFGRANKQDIGSSMSAEGRGGSSGGENLYLKASED

SEQ ID NO: 115 - DNA, 624 bp, Malus domestica
atgcagcagccaccacaaatgatccccgtcatgccttcatttcctcccaccaacatcaccaccgaacaaattcagaagtaccttgatgacaacaaaaagttgattctggcaatattggataatcaaaatcttggaaaacttgctgagtgtgctcagtaccaggctctgcttcaaaagaatctgatgtatttagcagcaattgccgatgcgcaaccacaggcaccagctgcccctccccagatggccccacatcctgctatgcaacaggcaggatattacatgcaacatcctcaggcagcagcaatggctcagcaacagggtattttctccccaaagatgccgatgcaattcaataacatgcatcaaatgcacgatccacagcagcaccaacaagccatgcaagggcaaatgggaatgagacctggagggcctaacggcatgccttccatgcttcatactgaggccacacatggtggtggtagtggcggcccaaattcagctggagacccaaatgatgggcgtggaggaagcaagcaagacgcctctgagtctggggcaggtggtgatggccaggggacctcagccggcgggcgtggaactggtgatggagaggacggcaagtga

SEQ ID NO: 116 - protein, 207 aa, Malus domestica
MQQPPQMIPVMPSFPPTNITTEQIQKYLDDNKKLILAILDNQNLGKLAECAQYQALLQKNLMYLAAIADAQPQAPAAPPQMAPHPAMQQAGYYMQHPQAAAMAQQQGIFSPKMPMQFNNMHQMHDPQQHQQAMQGQMGMRPGGPNGMPSMLHTEATHGGGSGGPNSAGDPNDGRGGSKQDASESGAGGDGQGTSAGGRGTGDGEDGK

SEQ ID NO: 117 - DNA, 639 bp, Medicago trunculata
atgcagcagacacctcaaatgattcctatgatgccttcattcccacaacaaacaaacataaccactgagcagattcaaaaatatcttgatgagaacaagaagctgatcctggcaatattggacaatcaaaatcttggaaaacttgcagaatgtgcccagtaccaagctcagcttcagaagaatttgatgtatttagctgcaattgctgacgcgcagccacaaacaccggccttgcctccacagatggccccgcaccctgcgatgcaacaaggattctatatgcaacatcctcaggctgcagcaatggctcagcaacaaggaatgttcccccaaaaaatgccaatgcagttcggtaatccgcatcaaatgcaggatcagcagcatcagcagcaacaacagcagctacatcagcaagctatgcaaggtcaaatgggacttagacctggagggataaataacggcatgcatccaatgcacaacgaggctgctctcggaggtagcggcagtggtggtcaaatgacgggcgtggtggtggagcaagcaagatgcttcggagctgggacagccggcggtgatggtcaaggaacctctgccgcagctgcgcacaacagtggagatgcttcagaagaaggaaagtaa

SEQ ID NO: 118 - protein, 213 aa, Medicago trunculata
MQQTPQMIPMMPSFPQQTNITTEQIQKYLDENKKLILAILDNQNLGKLAECAQYQAQLQKNLMYLAAIADAQPQTPALPPQMAPHPAMQQGFYMQHPQAAAMAQQQGMFPQKMPMQFGNPHQMQDQQHQQQQQQLHQQAMQGQMGLRPGGINNGMHPMHNEAALGGSGSGGPNDGRGGGSKQDASEAGTAGGDGQGTSAAAAHNSGDASEEGK

SEQ ID NO: 119 - DNA, 624 bp, Panicum virgatum
atgcagcagcagatgcccatgcagtcggcgcccccggcgaccggcatcaccaccgagcagatccaaaagtatttggatgaaaataagcagcttattttggccatcctggaaaatcagaacttaggaaagttggctgaatgtgctcagtatcaagctcagcttcaaaagaatctcttgtacctggctgcgattgcagatgcccaaccccaaccaccacagaaccctgcaagtcgcccacagatgatgcaacctggcatggtaccaggtgcagggcattacatgtcccaagtaccaatgttcccgccaagaacaccattaaccccgcaacagatgcaagaacagcagcagcagcagcagcagcttcaacagcagcaagcacaggctcttgctttcccgggacagatggtcatgagacctaccattaatggcatgcagcctatgcaagccgaccctgctgccgccgccgccagcctacagcagtcagcacctggccctactgatgggcgaggaggcaagcaagatgcaactgctggggtgagcacagagccttctggcaccgagagccacaagagcacaaccgcagcagatcacgatgtgggcactgatgtcgcggagaaatcctaa

SEQ ID NO: 120 - protein, 207 aa, Panicum virgatum
MQQQMPMQSAPPATGITTEQIQKYLDENKQLILAILENQNLGKLAECAQYQAQLQKNLLYLAAIADAQPQPPQNPASRPQMMQPGMVPGAGHYMSQVPMFPPRTPLTPQQMQEQQQQQQQLQQQQAQALAFPGQMVMRPTINGMQPMQADPAAAAASLQQSAPGPTDGRGGKQDATAGVSTEPSGTESHKSTTAADHDVGTDVAEKS

SEQ ID NO: 121 - DNA, 747 bp, Picea sitchensis
atgcagcagcatctcatgcaaatgcagcccatgatggcggcatacgcctccaacaacatcaccactgatcacatccagaagtacctggatgagaacaagcagttgattctggcaattctggacaaccaaaatcttggaaagctcaatgagtgtgctcagtaccaagcaaaacttcagcagaatttgatgtatctggctgcgattgctgattctcaaccacaagcacaaactgcacatgctcagattcctcctaatgcagtgatgcagtctggtgggcattacatgcagcaccagcaggcacagcaacaagtgactcctcagtctctgatggcagctagatcttccatgctgtattctcagcagccgatggctgctttgcatcaagctcagcaacaacagcagcagcagcatcagcagcaacaacaatctcttcacagccagcttggcataaattctggaggaagcagtggattgcatatgttgcatggtgagacaaacatgggatgtaatgggcctctctcatctgggggcttccctgaatttgggcgtgggtctgctacctctgctgaaggtatgcaggccaacaggggcttcactatagatcgtggttcaaataagcaggatggagtaggatcagagaatgcccatccaggtgctggtgatggaagagggagttcaactggagggcagaatgcagatgagtcagaaccatcatacctgaaagcctccgaagaagaaggaaactag

SEQ ID NO: 122 - protein, 248 aa, Picea sitchensis
MQQHLMQMQPMMAAYASNNITTDHIQKYLDENKQLILAILDNQNLGKLNECAQYQAKLQQNLMYLAAIADSQPQAQTAHAQIPPNAVMQSGGHYMQHQQAQQQVTPQSLMAARSSMLYSQQPMAALHQAQQQQQQQHQQQQQSLHSQLGINSGGSSGLHMLHGETNMGCNGPLSSGGFPEFGRGSATSAEGMQANRGFTIDRGSNKQDGVGSENAHPGAGDGRGSSTGGQNADESEPSYLKASEEEGN

SEQ ID NO: 123 - DNA, 735 bp, Pinus taeda
atgcagcagcacctcatgcaaatgcagcccatgatggcggcctacgcctccaacaatatcaccactgatcacatccagaagtacctggatgagaacaagcagttgattctggcaattttggacaaccaaaatctcggaaagctcaatgagtgtgctcaataccaagcaaaacttcagcagaatttgatgtatctggctgctattgctgattctcaacctcaagcacaaactgcacatgctcagattcctccaaatgcggtgatgcagtctggtgggcattacatgcagcatcaacaggcacagcaacaagttactcctcagtctctgatggcagctagatcttccatactgtatgctcagcaacaacagcagcagcagcatcagcagcatcagcagcaacagcagcaacaacagtctcttcacagccagcttggcataaattctggaggaagcagcggtttgcatatgttgcatggtgagacaaacatgggatgtaatgggcctctgtcatctgggggattccctgaatttgggcgtgggtctgctacctctgctgatggtatgcaggtgaacaggggctttgctatagatcgtggttcaaacaagcaggatggagttggatcagagaatgcccatgctggtgctggtgatggaagagggagttcaactggagggcagaatgcagatgagtcagaaccatcatacctgaaggcctccgaggaagaaggaaactag

SEQ ID NO: 124 - protein, 244 aa, Pinus taeda
MQQHLMQMQPMMAAYASNNITTDHIQKYLDENKQLILAILDNQNLGKLNECAQYQAKLQQNLMYLAAIADSQPQAQTAHAQIPPNAVMQSGGHYMQHQQAQQQVTPQSLMAARSSILYAQQQQQQQHQQHQQQQQQQQSLHSQLGINSGGSSGLHMLHGETNMGCNGPLSSGGFPEFGRGSATSADGMQVNRGFAIDRGSNKQDGVGSENAHAGAGDGRGSSTGGQNADESEPSYLKASEEEGN

SEQ ID NO: 125 - DNA, 663 bp, Populus tremula
atgcaacagcacctgatgcagatgcagcccatgatggcagcctattaccccagcaacgtcactactgatcatattcaacagtatctggacgaaaacaagtcattgattttgaagattgttgagagccagaattcagggaaactcagtgagtgtgcagagaaccaagcaagactgcaacaaaatctcatgtacttggctgcaattgctgattgtcagccccaaccacctaccatgcatgcccagttcccttccagcggcattatgcagccaggagcacattacatgcagcatcaacaagctcaacagatgacaccacaagcccttatggctgcacgctcttctatgctgcagtatgctcaacagccattctcagcgcttcaacaacagcaagccttacacagccagctcggcatgagctctggtggaagcgcaggacttcatatgatgcaaagcgaggctaacactgcaggaggcagtggagctcttggtgctggacgatttcctgattttggcatggatgcctccagtagaggaatcgcaagtgggagcaagcaagatattcggagtgcagggtctagtgaagggcgaggaggaagctctggaggccagggtggtgatggaggtgaaaccctttacttgaaatctgctgatgatgggaactga

SEQ ID NO: 126 - protein, 220 aa, Populus tremula
MQQHLMQMQPMMAAYYPSNVTTDHIQQYLDENKSLILKIVESQNSGKLSECAENQARLQQNLMYLAAIADCQPQPPTMHAQFPSSGIMQPGAHYMQHQQAQQMTPQALMAARSSMLQYAQQPFSALQQQQALHSQLGMSSGGSAGLHMMQSEANTAGGSGALGAGRFPDFGMDASSRGIASGSKQDIRSAGSSEGRGGSSGGQGGDGGETLYLKSADDGN

SEQ ID NO: 127 - DNA, 678 bp, Saccharum officinarum
atgcagcagcaacacctgatgcagatgaaccagaacatgattgggggctacacctctcctgccgctgtgacaaccgatctcatccagcagtacctggatgagaacaagcagctgatcctggccatcctcgacaaccagaacaatggcaaggtggaggagtgcgaacggcaccaagctaagctccagcacaacctcatgtacctggccgccatcgccgacagccagccaccacagactgcaccactatcacaatacccgtccaacctgatgatgcagccgggccctcggtacatgccaccgcagtccgggcagatgatgagcccgcagtcgctaatggcggcgcggtcctccatgatgtacgcgcacccgtccatgtcaccactccagcagcagcaggcagcgcacgggcagctgggcatggcttcagggggcggcggtggcacgaccagtgggttcaacatcctccatggcgaggccagtatgggcggtgctggtggcgcttgtgccggcaacaacatgatgaacgccggcatgttctcaggctttggccgcagcggcagtggcgccaaggagggatcgacctcgctgtcggttgacgtccgtggtggcaccagctccggcgcgcaaagcggggacggcgagtacctgaaagcaggcaccgaggaagaaggcagttaa

SEQ ID NO: 128 - protein, 225 aa, Saccharum officinarum
MQQQHLMQMNQNMIGGYTSPAAVTTDLIQQYLDENKQLILAILDNQNNGKVEECERHQAKLQHNLMYLAAIADSQPPQTAPLSQYPSNLMMQPGPRYMPPQSGQMMSPQSLMAARSSMMYAHPSMSPLQQQQAAHGQLGMASGGGGGTTSGFNILHGEASMGGAGGACAGNNMMNAGMFSGFGRSGSGAKEGSTSLSVDVRGGTSSGAQSGDGEYLKAGTEEEGS

SEQ ID NO: 129 - DNA, 561 bp, Saccharum officinarum
atgcagcagccgatgcccatgcagccgcaggcgccggagatgaccccggccgccggaatcaccacggagcagatccaaaagtatctggatgagaataagcagcttattttggctattttggaaaatcagaacctaggaaaattggcagaatgtgctcagtatcaatcacaacttcagaagaacctcttgtatctcgctgcaatcgcagatgcccaaccacagactgctgtaagccgccctcagatggcgccgcctggtgcattgcctggagtagggcagtacatgtcacaggtgcctatgttcccaccgaggacacctctaacaccccagcagatgcaggagcagcaacttcagcagcagcaggctcagctgctaaatttcagtggcctaatggttgctagacctggcatggtcaacggcatgcctcagtccattcaagttcagcaagctcagccaccaccagcagggaacaaacaggatgctggtggggtcgcctcggagccctcgggcattgagaaccacaggagcactggtggtgataatgatggtggaagcgactag

SEQ ID NO: 130 - protein, 186 aa, Saccharum officinarum
MQQPMPMQPQAPEMTPAAGITTEQIQKYLDENKQLILAILENQNLGKLAECAQYQSQLQKNLLYLAAIADAQPQTAVSRPQMAPPGALPGVGQYMSQVPMFPPRTPLTPQQMQEQQLQQQQAQLLNFSGLMVARPGMVNGMPQSIQVQQAQPPPAGNKQDAGGVASEPSGIENHRSTGGDNDGGSD

SEQ ID NO: 131 - DNA, 642 bp, Saccharum officinarum
atgcagcagcagatgcccatgccgccggcgcccgctgcggcggcggcgcccccggcggccggcatcaccaccgagcagatccaaaagtatttggacgaaaataagcaacttattttggccatcctggaaaatcagaacttaggaaagttggctgaatgtgctcagtatcaagctcaacttcaaaagaacctcttgtacctggctgcgattgctgatgcccaaccccagccaccacaaaaccctgcaggtcgccctcagatgatgcaacctggtatagtgccaggtgcggggcattacatgtcacaagtaccaatgttccctccaagaactccattaaccccacagcagatgcaagagcagcagcagcaacagcttcagcagcagcaagcgcaggctcttacattccctggacagatggtcatgagaccagctaccatcaacggcatacagcagcctatgcaagctgaccctgcccgggcagcggagctgcaacaaccaccacctatcccagctgacgggcgagtaagcaagcagcaggacacaacggctggcgtgagctcagagccttctgccaatgagagccacaagaccacaactggagcagatagtgaggcaggtggtgacgtggcggagaaatcctaa

SEQ ID NO: 132 - protein, 213 aa, Saccharum officinarum
MQQQMPMPPAPAAAAAPPAAGITTEQIQKYLDENKQLILAILENQNLGKLAECAQYQAQLQKNLLYLAAIADAQPQPPQNPAGRPQMMQPGIVPGAGHYMSQVPMFPPRTPLTPQQMQEQQQQQLQQQQAQALTFPGQMVMRPATINGIQQPMQADPARAAELQQPPPIPADGRVSKQQDTTAGVSSEPSANESHKTTTGADSEAGGDVAEKS

SEQ ID NO: 133 - DNA, 645 bp, Solanum tuberosum
atgcagcagcacctgatgcagatgcagcccatgatggcagcttactatccaacgaacgtcactactgaccatattcaacagtatttggatgagaacaaatcactcattctgaaaattgttgagagccaaaactcgggaaaactcagtgaatgtgcagagaaccaagctaggcttcagaggaatctgatgtaccttgctgctattgctgattcacaacctcagccttctagcatgcattctcagttctcttctggtgggatgatgcagccagggacacacagttacctgcagcagcagcagcagcaacaacaagcgcaacaaatggcaacacaacaactcatggctgcaagatcctcatcaatgctctatggacaacaacagcagcagcagcagcagtctcagttatcacaatttcaacaaggcttgcatagtagccaacttggcatgagttctggcagtggtggaagcactggacttcatcacatgcttcaaagtgaatcatcacctcatggtggtggtttctctcatgacttcggccgtgcaaataagcaagacattgggagtagtatgtctgctgaagggcgcggcggaagctcaggtggtgatggtggtgagaatctttatctgaaagcttctgaggattga

SEQ ID NO: 134 - protein, 214 aa, Solanum tuberosum
MQQHLMQMQPMMAAYYPTNVTTDHIQQYLDENKSLILKIVESQNSGKLSECAENQARLQRNLMYLAAIADSQPQPSSMHSQFSSGGMMQPGTHSYLQQQQQQQQAQQMATQQLMAARSSSMLYGQQQQQQQQSQLSQFQQGLHSSQLGMSSGSGGSTGLHHMLQSESSPHGGGFSHDFGRANKQDIGSSMSAEGRGGSSGGDGGENLYLKASED

SEQ ID NO: 135 - DNA, 645 bp, Sorghum bicolor
atgcagcagcagatgcccatgccgccggcgcccgctgcggcggcggcgacggcgcccccggcggccggcatcaccaccgagcagatccagaagtatttggacgaaaataagcaacttattttggccatcctagaaaatcagaacttaggaaagttggctgaatgtgctcagtatcaagctcaacttcaaaagaacctcttgtacctggctgcgattgctgatgcccaaccccgaccaccgcaaaaccctgcaggtcgccctcagatgatgcaacctggtatagtgccaggtgcagggcattacatgtcacaagtaccaatgttccctccaagaactccattaaccccacagcaaatgcaagagcagcagcagcaacagcttcagcagcagcaagcgcaggctcttgcattccctgggcagatggtcatgagaccagctaccatcaacggcatgcagcagcctatgcaggctgaccctgcccgggcagcggagctgcaacagccagcatctgtcccagccgacgggcgagtaagcaagcaggacacagcggctggggtgagctcagagccttctgccaatgagagccacaagaccacaaccggagcagatagtgaggcaggtggagacgtggcggagaaatcctaa

SEQ ID NO: 136 - protein, 214 aa, Sorghum bicolor
MQQQMPMPPAPAAAAATAPPAAGITTEQIQKYLDENKQLILAILENQNLGKLAECAQYQAQLQKNLLYLAAIADAQPRPPQNPAGRPQMMQPGIVPGAGHYMSQVPMFPPRTPLTPQQMQEQQQQQLQQQQAQALAFPGQMVMRPATINGMQQPMQADPARAAELQQPASVPADGRVSKQDTAAGVSSEPSANESHKTTTGADSEAGGDVAEKS

SEQ ID NO: 137 - DNA, 558 bp, Triticum aestivum
atgcagcaagcgatgcccatgccgccggcggcggcggcgccggggatgcctccgtctgctggcctcagcaccgagcagatccaaaagtacctggatgaaaataagcaactaattttggctatcttggaaaatcagaacctgggaaagttggcggaatgtgctcagtatcaagctcagcttcagaagaatcttttgtatttggctgcaatcgctgatactcagccacagaccactgtaagccgtcctcagatggcaccacctagtgcatccccaggggcagggcattacatgtcacaggtgccaatgttccctccgaggacccctctaacgcctcagcagatgcaggagcagcaactacagcagcaacaggctcagatgcttccgtttgctggtcaaatggttgcgagacctggggctgtcaatggcatgcctcaggcccctcaagttgaaccagcctatgcagcaggtggggccagttctgagccttctggcactgagagccacaggagcactggtgccgataatgacggggggagcggctgggctgatcagtcctaa

SEQ ID NO: 138 - protein, 185 aa, Triticum aestivum
MQQAMPMPPAAAAPGMPPSAGLSTEQIQKYLDENKQLILAILENQNLGKLAECAQYQAQLQKNLLYLAAIADTQPQTTVSRPQMAPPSASPGAGHYMSQVPMFPPRTPLTPQQMQEQQLQQQQAQMLPFAGQMVARPGAVNGMPQAPQVEPAYAAGGASSEPSGTESHRSTGADNDGGSGWADQS

SEQ ID NO: 139 - DNA, 603 bp, Triticum aestivum
atgcagcaggcgatgtccttgcccccgggagcggtcggcgcggtgtcctcgccggccggcatcaccaccgagcagatccaaaagtatttggatgaaaataagcaacttattttggccatccttgaaaatcagaacctaggaaagttggctgaatgtgctcagtatcaagctcaactccaaaagaatctcttgtatctagctgctatcgcggatgcccaaccaccacagaaccctacaagtcaccctcagatggtgcagcctggtagtatgcaaggtgcagggcattacatgtcacaagtaccaatgttccctccaagaacgcctttaaccccacagcagatgcaagagcagcagcaccagcagcttcagcagcagcaagcccaggccctttctttccccgcccaggtggtcatgagaccaggcaccgtcaacggcatgcagcagcctatgcaagcagccggcgacctccagccagcagcagcacctggagggagcaagcaggacgccgcagtggctggggccagctcggaaccatctggcaccaagagccacaagaacgcgggagcagaggaggtgggcgctgatgtagcagaacaatcctaa

SEQ ID NO: 140 - protein, 200 aa, Triticum aestivum
MQQAMSLPPGAVGAVSSPAGITTEQIQKYLDENKQLILAILENQNLGKLAECAQYQAQLQKNLLYLAAIADAQPPQNPTSHPQMVQPGSMQGAGHYMSQVPMFPPRTPLTPQQMQEQQHQQLQQQQAQALSFPAQVVMRPGTVNGMQQPMQAAGDLQPAAAPGGSKQDAAVAGASSEPSGTKSHKNAGAEEVGADVAEQS

SEQ ID NO: 141 - DNA, 672 bp, Vitis vinifera
atgcagcagcacctgatgcagatgcagcccatgatggcagcctattaccccagcaacgtcaccactgatcacattcagcagtatcttgatgaaaacaagtcattgattctgaagattgttgagagccagaattcaggaaaattgactgaatgtgcagagaaccaggcaagactacagagaaacctcatgtacctggctgcaattgctgattctcaaccccaaccacccaccatgcatgctcagttccctcctagtggcattgttcagccaggagctcactacatgcaacaccaacaagctcaacaaatgacaccacagtcgctcctggctgcacgctcctccatgctgtacacccaacaaccattttcggccctgcaacaacaacaagccatccatagccagcttggcatgggctctggtggaagtgcaggacttcacatgctgcaaagcgaggggagtaatccaggaggcaatggaacactggggactggtgggtttcctgatttcagccgtggaacttctggagaaggcctgcaggctgcaggcaggggaatggctggtgggagcaagcaagatatgggaaatgcagaagggcgaggagggaactcaggaggtcagggtggggatggaggtgagactctttacttgaaagctgctgaagatgggaattga

SEQ ID NO: 142 - protein, 223 aa, Vitis vinifera
MQQHLMQMQPMMAAYYPSNVTTDHIQQYLDENKSLILKIVESQNSGKLTECAENQARLQRNLMYLAAIADSQPQPPTMHAQFPPSGIVQPGAHYMQHQQAQQMTPQSLLAARSSMLYTQQPFSALQQQQAIHSQLGMGSGGSAGLHMLQSEGSNPGGNGTLGTGGFPDFSRGTSGEGLQAAGRGMAGGSKQDMGNAEGRGGNSGGQGGDGGETLYLKAAEDGN

SEQ ID NO: 143 - DNA, 663 bp, Zea mays
atgcagcagcagatgcccatgccgccggcgcccgctgccgccgcggcggcggcgcccccggcggcaggcatcactaccgagcagatccagaagtatttggacgaaaataagcaacttattttggccatcctggaaaatcagaacttagggaagttggctgaatgtgctcagtatcaagctcaacttcaaaagaacctcttgtacctggctgcgattgctgatgcccaaccccagcctccgcaaaaccctgcaggtcgccctcagatgatgcagcctggtatagtgccaggtgcggggcattacatgtcacaagtaccaatgttccctccaagaaccccattaaccccacagcagatgcaggagcagcagcaacaacaacagtttcagcagcagcagcagcaagtgcaggctcttacatttcctggacagatggtcatgagaccaggcaccatcaacggcatgcagcagcagcagcctatgcaggctgaccctgcccgggcagcagcggagctgcagcaggcagcacctatcccagctgacgggcgaggaagcaagcaggacaccgcgggtggggcgagctcagagccttctgccaatgagagccacaagagcgccaccggagcagataccgaggcaggtggcgacgtggccgagaaatcctaa

SEQ ID NO: 144 - protein, 220 aa, Zea mays
MQQQMPMPPAPAAAAAAAPPAAGITTEQIQKYLDENKQLILAILENQNLGKLAECAQYQAQLQKNLLYLAAIADAQPQPPQNPAGRPQMMQPGIVPGAGHYMSQVPMFPPRTPLTPQQMQEQQQQQQFQQQQQQVQALTFPGQMVMRPGTINGMQQQQPMQADPARAAAELQQAAPIPADGRGSKQDTAGGASSEPSANESHKSATGADTEAGGDVAEKS

SEQ ID NO: 145 - DNA, 2193 bp, Oryza sativa; identical to SEQ ID NO: 54

SEQ ID NO: 146 - protein, 12 aa, Artificial sequence
  Box I
  VARIANT (3)..(3): Xaa is Lys or Gln
  VARIANT (4)..(4): Xaa is Met, Phe, His, or Tyr
  VARIANT (6)..(6): Xaa is Glu or Asp
  VARIANT (7)..(7): Xaa is Asp or Glu
  VARIANT (9)..(9): Xaa is Asn or Lys
  VARIANT (10)..(10): Xaa can be any naturally occurring amino acid
IQXXLXXNXXLI

SEQ ID NO: 147 - protein, 10 aa, Artificial sequence
  Box II
  VARIANT (3)..(3): Xaa is Leu, Val, or Met
  VARIANT (7)..(7): Xaa is Thr or Ala
NLXYLAXIAD

SEQ ID NO: 148 - DNA, 53 bp, Artificial sequence
  primer: prm06681
ggggacaagtttgtacaaaaaagcaggcttaaacaatgcaacagcacctgatg

SEQ ID NO: 149 - DNA, 50 bp, Artificial sequence
  primer: prm06682
ggggaccactttgtacaagaaagctgggtcatcattaagattccttgtgc

SEQ ID NO: 150 - DNA, 615 bp, Brassica napus
atgcaacagcacctgatgcagatgcagcccatgatggctggttactaccccagcaatgtcacctctgatcatattcagcagtacttggacgagaacaaatcgttgattctgaagatagttgaatctcaaaactcgggaaagctcagcgagtgtgccgagaaccaggcaaggcttcaacgcaacttaatgtacttagctgcaattgcagattctcagcctcaacctccaagcatgcatagccagtatggaactgctggtggtggtgggttgatgcagggagaaggagggtcacactatttgcaacagcaacaggcaattcaacagcagcagagtcagcagtctctaatggcggctcgatcttcaatgttgtatgctcagcagcagcaacagccttatgcaacgcttcagcagcagcaattgcaccatagccagcttgggatgagctcaagcagcggaggaggaagcagcggtctccatatgctacagggagaggctggtgggtttcatgattttggccgtgagaagttggaaatgggaagtggtgaaggcagaggaggaagctcaggggatggtggagaaaccctttacttgaagtcatcagatgatgggaactga

SEQ ID NO: 151 - protein, 204 aa, Brassica napus
MQQHLMQMQPMMAGYYPSNVTSDHIQQYLDENKSLILKIVESQNSGKLSECAENQARLQRNLMYLAAIADSQPQPPSMHSQYGTAGGGGLMQGEGGSHYLQQQQAIQQQQSQQSLMAARSSMLYAQQQQQPYATLQQQQLHHSQLGMSSSSGGGSSGLHMLQGEAGGFHDFGREKLEMGSGEGRGGSSGDGGETLYLKSSDDGN

SEQ ID NO: 152 - DNA, 639 bp, Glycine max
atgcagcagcacctgatgcagatgcagcccatgatggctgcctactaccccaacaacgtcaccactgatcacattcaacagtacctggatgagaacaagtccttgattctgaagattgttgaaagccagaattctggcaagctgagcgagtgtgccgagaaccaatcaaggctgcagagaaatctcatgtacctagctgcaatagctgattctcaaccacaaccatctccattggctggtcagtatccttctagtggacttgtgcagcagggagcacactacatgcaggctcaacaggctcagcagatgtcacaacaacagctaatggcttcgcgctcctcgctcctgtactcccaacagcctttctcagtgcttcaacagcagcaaggcatgcacagccaacttggcatgagctccagtggaagtcaaggcctccacatgctgcaaagtgaagccactaatgttggaggcaatgcaaccataggaaccggaggagggtttccggactttgtacgcattggtagtggcaagcaagatattggaatctctggtgaaggcagaggaggaaactctagtggccactctggtgatggtggtgagacacttaattacctgaaagctgctggtgatggaaactga

SEQ ID NO: 153 - protein, 212 aa, Glycine max
MQQHLMQMQPMMAAYYPNNVTTDHIQQYLDENKSLILKIVESQNSGKLSECAENQSRLQRNLMYLAAIADSQPQPSPLAGQYPSSGLVQQGAHYMQAQQAQQMSQQQLMASRSSLLYSQQPFSVLQQQQGMHSQLGMSSSGSQGLHMLQSEATNVGGNATIGTGGGFPDFVRIGSGKQDIGISGEGRGGNSSGHSGDGGETLNYLKAAGDGN

SEQ ID NO: 154 - DNA, 1248 bp, Chlamydomonas reinhardtii
atggccgccaccatgctccgctccagcacccagtcgggcattgccgctaaggccggccgcaaggaggctgtcagcgtccgcgcggtcgcccagccccagcgccaggctggtgctgccagcgtcttctcctcgtcgtcgtcgggcgctgctgctcgccgcggggtcgtcgctcaggccaccgctgttgccacccccgcggccaagcctgcggccaagaccagccagtatgagctgttcacgctcaccacctggctgctgaaggaggagatgaagggcacaatcgatggcgagcttgtgaccgtcatctcgtcggtgtcgctggcctgcaagcaaatcgcgtcgctggtgaaccgcgctggtatctccaacctgaccggtgtggctggcaaccagaacgtgcagggtgaggaccagaagaagctggacgtggtgtccaacgaggtcttcaagaactgcctggcctcctgcggccgcacgggtgtgatcgcctccgaggaggaggaccagcccgtggccgtggaggagacctactcgggcaactacatcgtggtgttcgaccccctggacggctcgtccaacatcgacgccggcatctccgtcggctccatcttcggcatctacgagcccagcgaggagtgccccattgacgccatggacgacccccagaagatgatggagcagtgcgtcatgaacgtgtgccagcccggctcgcgcctcaagtgcgccggctactgcctgtacagcagcagcaccatcatggtgctgaccatcggcaacggtgtgttcggcttcacgctggaccccctggtcggcgagttcgtgctgacccaccccaacgtgcagatccccgaggtgggcaagatctacccgttcaacgagggcaactacggcctgtgggacgacagcgttaaggcttacatggacagcctgaaggaccccaagaagtgggacggcaagccctactcggcccgctacatcggctccctggtcggtgacttccaccgcaccctgctgtacggaggcatctacggctaccccggcgacgccaagaacaagaacggcaagctccgcctgctgtacgagtgcgcgcccatgtcgttcattgccgagcaggccggcggcctcggctccaccggccaggagcgcgtgctggacgtgaaccccgagaaggtgcaccagcgcgtgccgctgttcatcggctccaagaaggaggtcgagtacctggagtccttcaccaagaagcactaa

SEQ ID NO: 155 - protein, 415 aa, Chlamydomonas reinhardtii
MAATMLRSSTQSGIAAKAGRKEAVSVRAVAQPQRQAGAASVFSSSSSGAAARRGVVAQATAVATPAAKPAAKTSQYELFTLTTWLLKEEMKGTIDGELVTVISSVSLACKQIASLVNRAGISNLTGVAGNQNVQGEDQKKLDVVSNEVFKNCLASCGRTGVIASEEEDQPVAVEETYSGNYIVVFDPLDGSSNIDAGISVGSIFGIYEPSEECPIDAMDDPQKMMEQCVMNVCQPGSRLKCAGYCLYSSSTIMVLTIGNGVFGFTLDPLVGEFVLTHPNVQIPEVGKIYPFNEGNYGLWDDSVKAYMDSLKDPKKWDGKPYSARYIGSLVGDFHRTLLYGGIYGYPGDAKNKNGKLRLLYECAPMSFIAEQAGGLGSTGQERVLDVNPEKVHQRVPLFIGSKKEVEYLESFTKKH

SEQ ID NO: 156 - DNA, 1239 bp, Bigelowiella natans
atggctgccgtgctctttcgcggaggtgtgctgtcttccaccatgactgcggctcgcacattcgcagcgccatctgtgcacacccgtggcatgcacatgtcagtcaagagcagtaaccctttctctcaggctggtcgtcgtgctgctgttagatccagtgtcgcaccctcccctgtccaagactctgctggtactatcgttgatgacggaactgtcacattaacaagattcatgattgaggaggcaatgaagagcaagactcctgggcaggaggacatggttcgtttgatttcttccatctcagttgcatgcaaacgcattgcatccatggtgcaaactgcaggaatctccggatctacaggtctggctgaaggtggtggatcagtcaacgttcaaggcgaggaacagaagaaacttgatgtcatttctaacgatgtactaaagtctgcccttcgtccttctggaaaacttggagtaattgcctctgaggaggaagataatccagttgtcgttgatgaactttactccggcgaatatgttgctactttcgatccgctcgatggatcttccaatattgatgctgcaatttccactggaactatcttcggagtgttcaaagctccagaagagtgcttgatcggggattctgataatctcagtattgcagagcagcaatgtttggaggcaacacttcaacctggaactaaccttgttgctgctggatactgcatgtattcgtcctccaccatccttgttctcaccaccggagacgggctcaatggatttactcttgacccttccattggagagttcatcctcacccatcctaatatccagattcctagccgtggaaagatctattctatgaacgaagcaaactacttcgattgggaccctaagcttcagacctacgttgataaccttaagaaggcagaaggtcaaactggagaaaagtacagctctcgctacatcggatccatggtcggagatgtgcaccgtacccttctctatggaggcatcttcgcttaccctggagataagaagaacgtcaacggaaaacttcgccttctgtacgaagctgctccaatgtcccttatcttcgaacaagcgggtggaaaatctattactggacctggtggacgtgtgttggacttagttcctgataaggttcaccagcgttgtcctgtgttcattggatcccctgatgatgtggatgaagttgaaaaggctctcgcataa

SEQ ID NO: 157 - protein, 412 aa, Bigelowiella natans
MAAVLFRGGVLSSTMTAARTFAAPSVHTRGMHMSVKSSNPFSQAGRRAAVRSSVAPSPVQDSAGTIVDDGTVTLTRFMIEEAMKSKTPGQEDMVRLISSISVACKRIASMVQTAGISGSTGLAEGGGSVNVQGEEQKKLDVISNDVLKSALRPSGKLGVIASEEEDNPVVVDELYSGEYVATFDPLDGSSNIDAAISTGTIFGVFKAPEECLIGDSDNLSIAEQQCLEATLQPGTNLVAAGYCMYSSSTILVLTTGDGLNGFTLDPSIGEFILTHPNIQIPSRGKIYSMNEANYFDWDPKLQTYVDNLKKAEGQTGEKYSSRYIGSMVGDVHRTLLYGGIFAYPGDKKNVNGKLRLLYEAAPMSLIFEQAGGKSITGPGGRVLDLVPDKVHQRCPVFIGSPDDVDEVEKALA

SEQ ID NO: 158 - DNA, 1230 bp, Aquilegia formosa x Aquilegia pubescens
atggttgcagcagctatccctacttcttgtcaactgctcttctccacctcttcttcgaccacttctcgtctatatcctccttatcttgatgccaaaactctcttctcatttcctacaaacaagagacatgtaagcattgttagaactccggcaggtgtacggtgtcaagcattaggagcagaggtagtagtgaccaagaggagtgcatttgagatacaaactctaacaggatggttattgaaacaagaacaaacaggggttatagatgcagagttaactatagttttgtctagcatttcaatggcctgtaagcagattgcttcattggtgcagagggcaagtatttccaacttaactggagttcaaggagctgttaatattcaaggtgaagatcagaagaagcttgatgtcatctctaacgaggtgttctctaattgccttagatcaagtggaagaacagggattatagcatcagaagaagaggatgtaccagttgcagtggaggaaagctactctggcaactatattgtcgtttttgatcctcttgacgggtcatcaaacattgatgccgctgtgtcaactggatccatatttggaatttatagtccgaacgatgagtgtcttactgaagtcgatgataatgccacagtgcttcagcaagtggaacagaagtgcatcatcaatgtgtgtcaacctggcaacaacttgttggcagctggctactgcatgtactcaagctctgtaatctttgtgctttccattggacaaggggttttctcatttaccttagaccctatgtacggagaattcgtcttgacacaggaaaacattcaaatacctaaatcaggtaaaatctactcattcaacgaaggcaactaccaattatgggatgataagttgaagaagtatatcgatgaccttaaggaccctggtcctagtggcaaaccatactcttccagatacattggaagcttggttggcgatttccaccggacccttctttatggagggatatatggataccctagggataagaatagaaaaaatgggaagctaaggctactgtatgagtgtgcacctatgagttatttagttgaacaagcaggaggaaaaggatcagatggacaccaaagagtactcgatattgaaccggtggagattcatcagcgtgttccacttttcattggcagcgttgaagaagttgagaaactagagaagttcttggcttga

SEQ ID NO: 159 - protein, 409 aa, Aquilegia formosa x Aquilegia pubescens
MVAAAIPTSCQLLFSTSSSTTSRLYPPYLDAKTLFSFPTNKRHVSIVRTPAGVRCQALGAEVVVTKRSAFEIQTLTGWLLKQEQTGVIDAELTIVLSSISMACKQIASLVQRASISNLTGVQGAVNIQGEDQKKLDVISNEVFSNCLRSSGRTGIIASEEEDVPVAVEESYSGNYIVVFDPLDGSSNIDAAVSTGSIFGIYSPNDECLTEVDDNATVLQQVEQKCIINVCQPGNNLLAAGYCMYSSSVIFVLSIGQGVFSFTLDPMYGEFVLTQENIQIPKSGKIYSFNEGNYQLWDDKLKKYIDDLKDPGPSGKPYSSRYIGSLVGDFHRTLLYGGIYGYPRDKNRKNGKLRLLYECAPMSYLVEQAGGKGSDGHQRVLDIEPVEIHQRVPLFIGSVEEVEKLEKFLA

SEQ ID NO: 160 - DNA, 1254 bp, Arabidopsis thaliana
atggcagcatcggccgcaacaacgacgtcgtctcaccttcttctctcaagctcacgtcacgtggcttcatcatcccagccttcaatcctttcaccgagatctctcttctccaacaacgggaaacgagcaccaactggagtgagaaaccatcagtatgcgagtggagtgaggtgtatggccgtagcggcggatgcttctgagacgaaaacggcggcgaggaagaagagtggatacgaacttcaaacgttgacgggctggttgctgagacaagagatgaaaggagagatagatgcagagctgacgatagtgatgtcgagtatatcattggcttgtaagcagatcgcttcacttgttcaacgtgccggaatatctaacctgaccggagttcaaggcgccattaatattcagggagaggatcagaagaagcttgacgtcatctctaatgaggtgttttccaactgtttgagatcaagtggaagaacgggaatcatagcctcggaggaagaggacgtgccagttgcggtggaggagagttactccggcaactacgtcgtcgtgtttgaccctcttgatggttcctccaacattgacgctgccgtctctactggttctatcttcggtatctatagccccaatgacgaatgcattgtcgacgactccgacgatatctcagctcttgggtcagaagaacaaaggtgtatagtaaacgtgtgccagccagggaacaacttgttagcagccggctactgtatgtactcgagctcggtcatcttcgttcttactctaggcaaaggcgttttctccttcacgcttgatccaatgtacggtgagtttgtcctcacgcaagaaaacattgagatccccaaagccgggagaatctactctttcaacgaagggaattaccagatgtgggacgataaactaaagaagtacattgatgaccttaaggaccctggtccaactgggaagccttactcggcaaggtacattggaagtttggttggagattttcacaggactttgttgtacggtgggatttacgggtaccctcgtgacgcaaagagcaaaaatggaaagcttaggcttttgtatgagtgtgcaccaatgagtttcattgttgaacaagctggagggaaaggttctgatggacattcgagagtactagatatccaaccgactgagatacatcagagggttcctctatacattggaagcacagaggaagtagagaagttggagaagtacttggcttga

SEQ ID NO: 161 - protein, 417 aa, Arabidopsis thaliana
MAASAATTTSSHLLLSSSRHVASSSQPSILSPRSLFSNNGKRAPTGVRNHQYASGVRCMAVAADASETKTAARKKSGYELQTLTGWLLRQEMKGEIDAELTIVMSSISLACKQIASLVQRAGISNLTGVQGAINIQGEDQKKLDVISNEVFSNCLRSSGRTGIIASEEEDVPVAVEESYSGNYVVVFDPLDGSSNIDAAVSTGSIFGIYSPNDECIVDDSDDISALGSEEQRCIVNVCQPGNNLLAAGYCMYSSSVIFVLTLGKGVFSFTLDPMYGEFVLTQENIEIPKAGRIYSFNEGNYQMWDDKLKKYIDDLKDPGPTGKPYSARYIGSLVGDFHRTLLYGGIYGYPRDAKSKNGKLRLLYECAPMSFIVEQAGGKGSDGHSRVLDIQPTEIHQRVPLYIGSTEEVEKLEKYLA

SEQ ID NO: 162 - DNA, 1254 bp, Brassica napus
atggcagcaaccgccgcgacaacgtcatcgtctcatcttcttctctcaagctctcgccacgtggcagcctcatctcagccacaaatccttttccagagatctctgttttccggcgggaaacgatcggcagctggaaaaaaccatcatgctagtggtggagtgaggtgtatggcggttgcagcggatgcttcggcggaggctaagccggcggcagcgaggaagaagagtgggtacgagcttcagacgctgacgggttggttgctgagacaagagcagaaaggagagatagatacagagctgacgatagtgatgtcgagcatagcgatggcttgtaagcagatcgcttcgcttgtacagcgcgccggaatctctaatctgaccggcgttcaaggagccgttaacattcagggagaggatcagaaaaagctcgacgtcgtctctaatgaggtattttcaaactgtttgagatcaagtggaaggacagggatcattgcgtcagaggaagaggacgtccccgtagcagttgaagagagttactccggaaactacattgtcgtctttgatcctctcgacggttcctccaacatcgacgctgcagtctccactggttcaatcttcggtatctacagccccaatgacgagtgtatcgttgacgactccgacgatatctcctctcttggttcagaagaacaaaggtgtatagtaaacgtgtgtcaaccagggaacaacttgctcgcagctggctactgtatgtactcgagctcagtcatcttcgttctcaccttaggcaagggcgttttctccttcacactcgacccaatgtacggcgagttcgtcctcactcaagagaacattgagatccccaaagcagggaaaatctactctttcaacgaagggaactaccagatgtgggacgagaaactgaagaagtacattgatgatcttaaggaccctggtccaagtgggaagccttactctgcaaggtacattggtagtttggtcggagactttcacagaactttgttgtacggtgggatttacgggtaccctcgtgacgccaagagcaaaaacggtaagcttaggcttttgtatgagtgtgcaccgatgagtttcatcgttgaacaagctggaggaaaaggatcagatggccaccaaagagtactagatatccaacccaccgagatacatcagagggttccactttacattggaagcaaagaagaagtagagaagctggagaagtacttggcttga

SEQ ID NO: 163 - protein, 417 aa, Brassica napus
MAATAATTSSSHLLLSSSRHVAASSQPQILFQRSLFSGGKRSAAGKNHHASGGVRCMAVAADASAEAKPAAARKKSGYELQTLTGWLLRQEQKGEIDTELTIVMSSIAMACKQIASLVQRAGISNLTGVQGAVNIQGEDQKKLDVVSNEVFSNCLRSSGRTGIIASEEEDVPVAVEESYSGNYIVVFDPLDGSSNIDAAVSTGSIFGIYSPNDECIVDDSDDISSLGSEEQRCIVNVCQPGNNLLAAGYCMYSSSVIFVLTLGKGVFSFTLDPMYGEFVLTQENIEIPKAGKIYSFNEGNYQMWDEKLKKYIDDLKDPGPSGKPYSARYIGSLVGDFHRTLLYGGIYGYPRDAKSKNGKLRLLYECAPMSFIVEQAGGKGSDGHQRVLDIQPTEIHQRVPLYIGSKEEVEKLEKYLA

SEQ ID NO: 164 - DNA, 1130 bp, Cyanidioschyzon merolae
atggcgaagcaagcaccgcacgctttcgttagccttggggctcctaagctgcgctcaacaaacatatggggaagggtatcggtgtcggtcttgccgctggaaacaaggcatcaacgtcgctttggtgcagtgagactgcgcgcagctttagacctacccatgacactcggacagtgggttctccaacaggagaggcagcatccagagaccgctgatttggctcctttgataacagccacagcgacagctggcaagcagattgcctcactggtcgcccgagcgggcgtgagcaacttgactggccttcagggctcggtcaacgtgcagggcgaggagcagaaaaagctggacgtgttgacgaacgaggtgctcaagaacgcgctacgctcaacagggaaactaggtgtcttggcttcggaagaggaaaacgagccagtgtcgctcatggaagaggcgtatacaggtgactttattgctgcgtttgacccgttggacggatcctcgaatttggatgcagcgatcgccacgggtacgatttttggtgtaatgcgcagcggcgagcactgtctgacgggacccgaggacgcggatataagtcagcgacaaatgcagtgcctcgtgcagacgctgcaaccgggtgcgaatctggtggcagcgggctacattctctactcctcatcggtgattttcatgctgtctattggtcacggagtgcagggtttttctctggacccagcgattggcgagtttgttttgacgcacccagatgttcgtgttccggagcgtggcaagatctactccttcaacgaggcaaactcggataactgggaccctgttcttcaagaatatattcgatcgatgaagaaaaagggctattcttcgcgctacataggatctctcgttggcgatgtccatcgcacgctgatttacggcggcgtttttggataccctggtgataagaagaacccgaacggcaagttgcgtcttctgtacgagtgcgcacctatggcgtatctcatggagcaggccggcggtatagcgaccacgggaaagcaaagaattctggatattgttccgcgagatgtccatcagcgagagccgttcatttgcggaagccccagggatgttga

SEQ ID NO: 165 - protein, 391 aa, Cyanidioschyzon merolae
MAKQAPHAFVSLGAPKLRSTNIWGRVSVSVLPLETRHQRRFGAVRLRAALDLPMTLGQWVLQQERQHPETADLAPLITATATAGKQIASLVARAGVSNLTGLQGSVNVQGEEQKKLDVLTNEVLKNALRSTGKLGVLASEEENEPVSLMEEAYTGDFIAAFDPLDGSSNLDAAIATGTIFGVMRSGEHCLTGPEDADISQRQMQCLVQTLQPGANLVAAGYILYSSSVIFMLSIGHGVQGFSLDPAIGEFVLTHPDVRVPERGKIYSFNEANSDNWDPVLQEYIRSMKKKGYSSRYIGSLVGDVHRTLIYGGVFGYPGDKKNPNGKLRLLYECAPMAYLMEQAGGIATTGKQRILDIVPRDVHQREPFICGSPRDVEDLLKIYQGSMAMRG

SEQ ID NO: 166 - DNA, 1218 bp, Glycine max
atggttgcaatggcagcagcaacagcatccacccagttgattttctcaaagccttgttccccttcacgtctatgccccttccaactatgtgtctttgacactaaacaagtgctatcaagtggcaggagaaggcatgtggggggttctggagttaggtgcatggctgtgggggaagcagcaaccactgggacaaagaagagaagtggatatgagcttcaaacactcactagctggttgctgaagcaggagcaagctggggtgattgatgcagaactcactattgtgctgtctagcatttccatggcatgcaaacagattgcttctttggtgcaaagagctaacatttccaacctcactggggttcaaggtgctgtcaatgttcaaggggaagaccagaaaaagcttgatgttgtttcaaatgaggttttctcaaactgcttgaggtcaagtgggaggacagggataatagcatcagaggaggaagatgtgccagtggcagtagaagagagttattctggaaactacattgtggtgtttgacccacttgatgggtcatccaatattgatgctgcagcgtcaactgggtccaatttttggatatacagccccaatgatgagtgtcttgctgacattgatgatgaccccacccttgacacaacagaacaaagatgtattgtgaacgtgtgccaacctggaagcaaccttcttgcagctggttactgcatgtattctagctcaataatctttgttctcacacttggaaatggagtgtttgtgtttacattggacccgatgtatggcgaattcgttttgactcaggaaaacctccagatacctagagcaggcaaaatctatgcattcaatgaaggtaattatcagttgtgggatgagaagctaaagaaatatattgatgatctcaaggacccaggtcaaagcggcaagccttattctgcaaggtacattggtagcttggtaggagatttccacaggacactgctatatggtggcatttacgggtaccccagggacaagaaaagcaagaatgggaaactaaggctcctgtatgaatgtgctcctattaacttcattgtagaacaagctggtggaaaaggtacagatggccttcaagtactccggcttcaagggacagagattcatcaacgtgtgccactgtacattggggaagaggtagagaaggtggaaaagtacttggcttaa

SEQ ID NO: 167 - protein, 405 aa, Glycine max
MVAMAAATASTQLIFSKPCSPSRLCPFQLCVFDTKQVLSSGRRRHVGGSGVRCMAVGEAATTGTKKRSGYELQTLTSWLLKQEQAGVIDAELTIVLSSISMACKQIASLVQRANISNLTGVQGAVNVQGEDQKKLDVVSNEVFSNCLRSSGRTGIIASEEEDVPVAVEESYSGNYIVVFDPLDGSSNIDAAASTGSNFWIYSPNDECLADIDDDPTLDTTEQRCIVNVCQPGSNLLAAGYCMYSSSIIFVLTLGNGVFVFTLDPMYGEFVLTQENLQIPRAGKIYAFNEGNYQLWDEKLKKYIDDLKDPGQSGKPYSARYIGSLVGDFHRTLLYGGIYGYPRDKKSKNGKLRLLYECAPINFIVEQAGGKGTDGLQVLRLQGTEIHQRVPLYIGEEVEKVEKYLA

SEQ ID NO: 168 - DNA, 1212 bp, Lycopersicon esculentum
atggcagcaacagcaacaacttcatatttaagtgctctagacaaaaagactccatttttatttgccttggacaaaaagactccatttttatgcccaaaaaacagcacaaagagaaggtcatttaatggaggagttaagtgcatggcaatagagacagcttcaggtgttacacaaaccaagaaaaagagtggctatgagttacaaactttaacaagttggctattgagacaagaacaagctggagttattgatgctgaacttaccatagtaatttcaagtatttcaatggcttgtaaacagattgcttctttggtccaaagagctggaatttctaaccttactggagttcaaggtgctgtcaatattcaaggagaagatcagaagaaacttgatgttgtctctaatgaggttttctcgaattgtctaagatcaagtggaaggactgggattatagcatcagaagaagaggatgtacctgtggcagtggaagagagttactcaggcaactacattgtggtgtttgatcctcttgatggatcatcaaacattgatgctgctgtatctaccggttctatctttggaatatacagcccgaatgatgagtgcctagctgatcttggagatgattccacgcttgacaatatagagcaaaagtgcatcgtgaatgtatgtcaaccagggacaaaccttcttgcagcaggatactgcatgtactcaagctctgtgattttcgtactcaccttgggaaatggcgttttttcctttaacttggatccaatgtatggagaatttgttctgactcaagaaaatgtccaaataccaaagtctggaaagatctattcattcaatgaaggaaactaccagctctgggatgacaagttgaaaaaatatatcgatgacttgaaagaccctggtcctagtggcaagccttactctgcaaggtacattggtagtttggtaggtgacttccatagaactcttctatatggtggcatttatggttatcctagagacagaaagagcaagaatggaaagttgaggcttttgtacgaatgtgctcccatgagcttcattgtggaacaagctggtggcaaaggatccgatggtcaccaaagagttctcgatatccaaccaactgagatacatcaacgagttccattgtacattggaagcacagaagaagttgaaaaattggagaagtacttgtcttaa

SEQ ID NO: 169 - protein, 403 aa, Lycopersicon esculentum
MAATATTSYLSALDKKTPFLFALDKKTPFLCPKNSTKRRSFNGGVKCMAIETASGVTQTKKKSGYELQTLTSWLLRQEQAGVIDAELTIVISSISMACKQIASLVQRAGISNLTGVQGAVNIQGEDQKKLDVVSNEVFSNCLRSSGRTGIIASEEEDVPVAVEESYSGNYIVVFDPLDGSSNIDAAVSTGSIFGIYSPNDECLADLGDDSTLDNIEQKCIVNVCQPGTNLLAAGYCMYSSSVIFVLTLGNGVFSFNLDPMYGEFVLTQENVQIPKSGKIYSFNEGNYQLWDDKLKKYIDDLKDPGPSGKPYSARYIGSLVGDFHRTLLYGGIYGYPRDRKSKNGKLRLLYECAPMSFIVEQAGGKGSDGHQRVLDIQPTEIHQRVPLYIGSTEEVEKLEKYLS

SEQ ID NO: 170 - DNA, 1236 bp, Medicago truncatula
atggttgcaatggcagcagcaacagcatcatcacaattaatattctcaaaaccttgttctccctcacgtctatgtcccttccaactttgtgttttcgacacgaaatcagtgttatcaagttcaagaagaaagcatgtgagtggctctggaggagtgagatgcatggctgttggtgaagtagctgctgagacaaagaaaagaagtagttatgagcttataacattgactagttggttgttgaagcaagaacaaacaggggttattgatgctgaacttactattgttttgaatagtatttcgttggcatgtaaacagattgcttctttggttcaaagagctaatatttctaaccttactggtgttcaaggtgctgtaaatattcaaggggaggatcagaaaaaacttgatgttgtctcaaatgaggtattctcaaattgtttgaggtcaagtgggaggacagggattatagcatcagaggaagaggatgtgccagtggcagtagaagagagttattcaggaaactacattgtggtctttgatccacttgatggttcatcgaatattgatgctgcagtttcaactggttctatttttgggatttacagccccaatgatgagtgtcttgctgacgtaggcaatgagtccgatgaccccacacttggcacagaagaacaacgatgcattgtgaatgtgtgccaaccaggaagcaaccttctagcagccggttactgcatgtattctagctcagtaatcttcgttctaacaatcggcaaaggagttttcgtattcacattagatccaatgtatggggaatttgttttgactcaagaaaatctccaaataccaaaatcagggaaaatttattctttcaatgaaggaaattacaagttatgggatgacaacttgaagaaatacatcgatgatctcaaggaaccgggtgctaatggcaaaccttattcagcaaggtatattggtagtttggtaggtgatttccataggacactgctatatggtggcatttatggttaccctagggacaagaaaagtaagaatggaaggcttaggcttttatatgagtgtgctccaatgagtttcattgtagaacaggctggtggaaaaggttcagatggtcatcaaagagtacttgacattcaacccaccgaaattcatcaacgtgttccactgtacattgggagcacagaggaagtggagaaggttgaaaagtacttggcttaa

SEQ ID NO: 171 - protein, 411 aa, Medicago truncatula
MVAMAAATASSQLIFSKPCSPSRLCPFQLCVFDTKSVLSSSRRKHVSGSGGVRCMAVGEVAAETKKRSSYELITLTSWLLKQEQTGVIDAELTIVLNSISLACKQIASLVQRANISNLTGVQGAVNIQGEDQKKLDVVSNEVFSNCLRSSGRTGIIASEEEDVPVAVEESYSGNYIVVFDPLDGSSNIDAAVSTGSIFGIYSPNDECLADVGNESDDPTLGTEEQRCIVNVCQPGSNLLAAGYCMYSSSVIFVLTIGKGVFVFTLDPMYGEFVLTQENLQIPKSGKIYSFNEGNYKLWDDNLKKYIDDLKEPGANGKPYSARYIGSLVGDFHRTLLYGGIYGYPRDKKSKNGRLRLLYECAPMSFIVEQAGGKGSDGHQRVLDIQPTEIHQRVPLYIGSTEEVEKVEKYLA

SEQ ID NO: 172 - DNA, 1236 bp, Nicotiana tabacum
atggcagcatcatcagcaacagcaacagcaacaacttcatttttatgtgctttagacaaaaagactccatttttatgtactctagacaaaaaaggtactccatttttatgcccaaaaggcagcagcacaacaaagagaaggtcatttaatggaggagtgaagtgcatggcaatagagacaacagcaggagctacagagaccaagaaaagaagtggctatgagttacaaactttaacaagctggctattaaggcaagaacaagctgggagtattgatgctgaacttaccatagtgatttcaagtatttctatggcttgtaagcagattgcttctttggttcagagagctggaatttctaaccttactggagttcaaggtgctgtcaatattcaaggagaagaccagaagaagcttgatgttgtctctaacgaggttttctcgaattgtctaaggtcgagtggaaggactgggattatagcatcagaggaagaggatgtaccagtggcagtggaagagagttactcaggaaactacattgtggtgtttgaccctcttgatggatcatcaaacattgatgctgctgtttctactggttctattttcggaatatacagcccaaatgatgagtgcctcgcagatcatggagatgattccacgcttgacaatgttgaacagaggtgtattgtgaatgtatgccaaccagggagcaaccttcttgcagcaggctactgcatgtactcaagctctgtgatttttgtggtcaccttgggaaacggagtctttgccttcaacttggatccgatgtatggagaattcgttctgacccaagaaaacatccaaataccaaaatctggaaagatctattcgttcaacgaaggaaactaccagctttgggatgacaaactgaagaaatacatcgatgacttgaaggaccctggtcctagcggcaagccttactctgctaggtacattggtagtttggttggtgacttccatagaactcttctatatggtggcatttatggctatcctagagataaaaagagtaagaatggaaagttgaggcttttgtatgagtgtgcccctatgagcttcctcgtggaacaagctggtggcaaaggatccgatggccaccaaagagttcttgatatccaaccaactgagatacaccagcgagtcccattgtacattggaagcacagaagaagttgaaaagttggagaagtatttatcttaa

SEQ ID NO: 173 - protein, 411 aa, Nicotiana tabacum
MAASSATATATTSFLCALDKKTPFLCTLDKKGTPFLCPKGSSTTKRRSFNGGVKCMAIETTAGATETKKRSGYELQTLTSWLLRQEQAGSIDAELTIVISSISMACKQIASLVQRAGISNLTGVQGAVNIQGEDQKKLDVVSNEVFSNCLRSSGRTGIIASEEEDVPVAVEESYSGNYIVVFDPLDGSSNIDAAVSTGSIFGIYSPNDECLADHGDDSTLDNVEQRCIVNVCQPGSNLLAAGYCMYSSSVIFVVTLGNGVFAFNLDPMYGEFVLTQENIQIPKSGKIYSFNEGNYQLWDDKLKKYIDDLKDPGPSGKPYSARYIGSLVGDFHRTLLYGGIYGYPRDKKSKNGKLRLLYECAPMSFLVEQAGGKGSDGHQRVLDIQPTEIHQRVPLYIGSTEEVEKLEKYLS

SEQ ID NO: 174 - DNA, 1221 bp, Oryza sativa
atggccgccgcagccacgacatcctcccacctgctcctgctctcccgccagcaggcggcggcctcgctccaatgcggcctctccttccggaggcagcccggcaggctcgccggtgggtcgtcggccccgagcgtgcggtgcatggcggccgtcgacacggcctcggcgcccgccgcgacggaggctagcaagaagagcagctacgagatcaccacgctgacgacgtggctgctgaagcaggagcaggccgggaccatcgacggcgagatgaccatcgtgctggccagcatctccacggcgtgcaagcagatcgcctcgctggtgcagcgcgcgcccatctccaacctcaccggcgtccagggcgccgtcaacgtgcagggcgaggaccagaaaaaactcgacgtcgtctccaacgaggtgttctccaactgcctcaaatcgagcgggcgcaccggcgtgatcgcgtcggaggaggaggacgtgccggtggccgtggaggagagctactcgggcaactacatcgtggtgttcgacccgctcgacggctcctccaacatcgacgccgccgtctccaccggctccatcttcggcatctacagccccaacgacgagtgcctagccgacatcgccgacgaccaaaatcttgaccaggtggagcagaggtgcatcgtgagcgtgtgccagccggggagcaacctgctcgccgccggctactgcatgtactcgagctcggtcatcttcgtgctcaccatcgggacaggggtgtacgtgttcacgctggacccgatgtacggcgagttcgtgctgacgcaggagaaggtgcagatccccaaggcaggcaagatctatgccttcaacgagggcaactacgcgctctgggacgacaagctcaagagctacatggacagcctcaaggagcccgggccgtccgggaagccatactccgcgcgctacatcggcagcctcgtcggcgacttccaccgcacgctgctctacggcggcatctacggctaccccagggaccagaagagcaagaacggcaagctgcggctgctgtacgagtgcgcgccgatgagcttcatcgtcgagcaggccggcggcaagggctccgatggccaccagaggatacttgacatcatgcctacggagatccatcagagagtgccgctgtacatcgggagcgtggaggaagtggagaaggtcgagaagttcttggcttga

SEQ ID NO: 175 - protein, 406 aa, Oryza sativa
MAAAATTSSHLLLLSRQQAAASLQCGLSFRRQPGRLAGGSSAPSVRCMAAVDTASAPAATEASKKSSYEITTLTTWLLKQEQAGTIDGEMTIVLASISTACKQIASLVQRAPISNLTGVQGAVNVQGEDQKKLDVVSNEVFSNCLKSSGRTGVIASEEEDVPVAVEESYSGNYIVVFDPLDGSSNIDAAVSTGSIFGIYSPNDECLADIADDQNLDQVEQRCIVSVCQPGSNLLAAGYCMYSSSVIFVLTIGTGVYVFTLDPMYGEFVLTQEKVQIPKAGKIYAFNEGNYALWDDKLKSYMDSLKEPGPSGKPYSARYIGSLVGDFHRTLLYGGIYGYPRDQKSKNGKLRLLYECAPMSFIVEQAGGKGSDGHQRILDIMPTEIHQRVPLYIGSVEEVEKVEKFLA

SEQ ID NO: 176 - DNA, 1143 bp, Ostreococcus lucimarinus
atgtctgccgccacctccgcctgcgctcgcgcgatcgtcgcgacgaagaagaccaccgcggcgcgccgcgcgggcaagtcggcgacgcgggcgacgccgcgatccgtcgcggcgcgcgcggggggcgcgggcacgccgttcacgacgtggatcttgcaacaagagatggaagaaaagatcgacggcgaactcgcggtcgtgttgtcgagcatcggcttggcgtgcaagcaaatcgcgagcttggtgcaacgcgccgggcttcaaggcatgacgggtttggcgggcgagacgaacgtgcaaggtgaagaccaaaagaagctcgacgtcatctccaacgatgtgttctgcgatgtcttgcgtcaaaccggccgcacgggcgtgattgcgtccgaggaagaagacgtgccggtcgccgtcgaagaaaccttcggcggtaactacgtcgtcgtcttcgatccgctcgatggctcttccaacatcgacgccgccgtttccacgggttccatctggggcatctacgagtccgactccacgtgcatcccggattttggcaccgaagatgcggccaagattgaagagaagtgcgtcatgaacgtgtgccaaccggggaacaacttgttgtgcgcgggctactgcatgtactcctcttccaccatcctcgtcttgaccctcggtgagggtgtgtacggtttcaccctcgacccgaccgtcggcgagttcatcatgtcccacgacaacatcaaggttccggaatctggtaagatttactccttcaacgaaggcaactacgacatgtggactccgggcttgaagaagtacatggactccctcaagactggcggcgcggaacaaggcaccaagccgtacagcgcccgttacatcggttccctcgtcggtgacttccacagaaccatcttgtacggaggcatctacggctacccgggcgactccaagaacccgaacggtaagcttcgcctcttgtacgagtgcgcgccgatgtccttcatcgccgaacaagccggcggtatgggttccaccggtaaggagcgcgtccttgacgttgtcccggaaaagtttcaccaacgtgtgccgttcttcaccggctccaagaaggaagtgcagtacttggaatccttcatgtag

SEQ ID NO: 177 - protein, 380 aa, Ostreococcus lucimarinus
MSAATSACARAIVATKKTTAARRAGKSATRATPRSVAARAGGAGTPFTTWILQQEMEEKIDGELAVVLSSIGLACKQIASLVQRAGLQGMTGLAGETNVQGEDQKKLDVISNDVFCDVLRQTGRTGVIASEEEDVPVAVEETFGGNYVVVFDPLDGSSNIDAAVSTGSIWGIYESDSTCIPDFGTEDAAKIEEKCVMNVCQPGNNLLCAGYCMYSSSTILVLTLGEGVYGFTLDPTVGEFIMSHDNIKVPESGKIYSFNEGNYDMWTPGLKKYMDSLKTGGAEQGTKPYSARYIGSLVGDFHRTILYGGIYGYPGDSKNPNGKLRLLYECAPMSFIAEQAGGMGSTGKERVLDVVPEKFHQRVPFFTGSKKEVQYLESFM

SEQ ID NO: 178 - DNA, 1134 bp, Ostreococcus tauri
atgtctgcgtgtatttctgcctctgtgacgcgcgcgcgaacggcgcgcgcgcccgcggctcgccgcgcggcgagtaaggcgcgggcgtcgccgcgcgccgtcgcggcgcgcgcggggggcgttggtacgccgtacacgacgtggattctccagcaagagatgcaagagaacattgatggtgaattggcggtggttttgtcctccatcggtctcgcgtgcaagcaaatcgcgagcctcgtccagcgcgcgggtctcgcgggcatgactggtttggcgggcgagcaaaacgtgcaaggcgaggaccagaagaagctcgacgtcatctccaacgatgttttctgcaacgtattgcgccaatccggccgcacgggcgtcatcgcctccgaagaagaagacgttccggtcgccgtcgaggaaacgtacggcggtaactacgtcgtcgtcttcgatccgcttgatggttcctccaatatcgacgccgccgtctccacgggatccatctggggtatctacgagtccgactcctcgtgtattcccgacttcggctccgatgactccgccaaggttgaagagaagtgcgtcatgaacgtttgccaaccgggcagcaacttgctctgcgcgggttactgcatgtactcctcgtccaccatcctcgtcatcaccatcggccaaggcgtgttcggttttaccctcgacccgaccgtcggtgagttcatcatgtcccacgagaacatcaaggttccggactctggcaagatttactctttcaacgaaggcaactacgccatgtggtccgacggtttgaagaagtacatggactccctcaagacgggcggcaaggacggtggcaagccgtacagcgcccgctacatcggttcgctcgtcggtgacttccaccgcacgatcctttacggaggcatctacggttacccgggtgacgcgaagaacccgaacggtaagctccgcctcctgtacgagtgcgcgccgatgtccatgatcgctgaacaagccggtggtaagggctccaccggtgtcgcgcgtgtcctggacatcgttccggaaaaggttcaccagcgcgtgccgttcttcgttggctccaagaacgaggttgcctacttggagtccttcatgtga

SEQ ID NO: 179 - protein, 377 aa, Ostreococcus tauri
MSACISASVTRARTARAPAARRAASKARASPRAVAARAGGVGTPYTTWILQQEMQENIDGELAVVLSSIGLACKQIASLVQRAGLAGMTGLAGEQNVQGEDQKKLDVISNDVFCNVLRQSGRTGVIASEEEDVPVAVEETYGGNYVVVFDPLDGSSNIDAAVSTGSIWGIYESDSSCIPDFGSDDSAKVEEKCVMNVCQPGSNLLCAGYCMYSSSTILVITIGQGVFGFTLDPTVGEFIMSHENIKVPDSGKIYSFNEGNYAMWSDGLKKYMDSLKTGGKDGGKPYSARYIGSLVGDFHRTILYGGIYGYPGDAKNPNGKLRLLYECAPMSMIAEQAGGKGSTGVARVLDIVPEKVHQRVPFFVGSKNEVAYLESFM

SEQ ID NO: 180 - DNA, 1254 bp, Phaeodactylum tricornutum
atgtttattttgaagtccccggcgctttggttgcttctttacccagttgttgcttttacggcggcgagggcgaactcgattcgtccagcggccgcgttatctgtcttcgatctgtcgagcgtggaggcagtaccgtctagaaagaccaaggccccaattttcgatgaagtttgcgacacaactggagtcactctcaaacgcttcatgaccgaggtttctctactgaatcctgaaatcgaagagctgacgacgctgtttggtgcgattgaaaccgcttgcaaagccattgcaaatcttgtcaagcgatcgccgcttccctccagtgacacgttgggtcttcagggagaaatcaacgttcaaggcgaagaccaaaagaaattagatgtgatcgccaacgatattttgaagcgagcactccgcttcacgggccgcctcggagtcttagcctcggaagaagaggatactcccgtcgatttgatgccaagggatcctagtaccaaaaaagttctaatcgatgagggagaaaagtatgtcgctgtcttcgatccgctcgatggtagctcaaacgttgatgcaggcataccgacaggcacaataattgggatatacgagcacgacgaaacttgcaagattgatcctgatgctttggaagaggatcggaccaaacaagaaaacctatgcctcgcaaatactctgcagcccggcaccaacttggtagcagcggcgtactgtttatattcttcgtcaacatttttggtgttgacgctgggagctggaacatatggattcacgctagatgagactatcggtgaatttgtcttgagccatccaaacattaagattcctgaatgctcatccattatgtcgttcaacgaggcaaatactcccagctgggatcgtccgcttcaagacactttcgcaaagtggaggacagggacaggaaagagcggcaagaaattttcaagtcgctacattggttctatggtaggggatgtccatcggacgctcctgtacggaggagtttttgggtatcctggcgacaaaaagaatcccaacgggaagctacgcctgctttatgaaggagctccaatgtcattcatcatggaacaggcgggtggattgtcgaccactggcacgcagcgtgtcatggaaatctccccagatacggtccatcaacgtgtgccgattatcatgggatccagacaagatgtcgaagaggtcatggacgcctataaaaactttggcatcgaataa

SEQ ID NO: 181 - protein, 417 aa, Phaeodactylum tricornutum
MFILKSPALWLLLYPVVAFTAARANSIRPAAALSVFDLSSVEAVPSRKTKAPIFDEVCDTTGVTLKRFMTEVSLLNPEIEELTTLFGAIETACKAIANLVKRSPLPSSDTLGLQGEINVQGEDQKKLDVIANDILKRALRFTGRLGVLASEEEDTPVDLMPRDPSTKKVLIDEGEKYVAVFDPLDGSSNVDAGIPTGTIIGIYEHDETCKIDPDALEEDRTKQENLCLANTLQPGTNLVAAAYCLYSSSTFLVLTLGAGTYGFTLDETIGEFVLSHPNIKIPECSSIMSFNEANTPSWDRPLQDTFAKWRTGTGKSGKKFSSRYIGSMVGDVHRTLLYGGVFGYPGDKKNPNGKLRLLYEGAPMSFIMEQAGGLSTTGTQRVMEISPDTVHQRVPIIMGSRQDVEEVMDAYKNFGIE

SEQ ID NO: 182 - DNA, 1233 bp, Pisum sativa
atggttgcaatggcagcagcaacagcctcatctcagttaatattctcaaaaccttactctccttcacgtctttgccccttccaactctgtgtctttgatgcaaaatcagtgttatcaagttcaaggagaaagcatgtgaatggctctggtgttagatgtatggctgtgaaggaagcaactagtgagacaaagaaaagaagtggatatgagattataacactgactagttggttgttgcagcaagaacaaaaagggattattgatgcagaacttactattgtactttctagtatttctatggcatgtaaacaaattgcttctttggttcaaagagccaatatttctaacctcactggtactcaaggtgctgtaaatattcaaggggaagaccagaaaaaacttgatgttatctcaaatgaggtattctcaaattgcttgaggtcaagtgggaggacagggataattgcgtcggaggaagaggatgtcgcggtggcagtagaagagagttattcaggaaactacattgttgtatttgatccacttgatggttcatccaatcttgatgctgcagtctcaaccggttccattttcgggatttacagccccaatgacgagtgtcttcctgattttggtgatgactctgatgacaacacacttggcacagaagaacaaaggtgcattgtgaatgtgtgtcaaccaggaagcaaccttctagcagctggctactgcatgtattctagttcagtagcttttgttcttaccataggcaaaggagtgtttgtattcacattagatccattgtacggagaattcgttttgactcaagagaatctccaaataccgaaatcaggggaaatctattctttcaatgaagggaattacaagttgtgggatgaaaacttgaagaaatatattgatgatcttaaggaaccaggtcctagtggcaagccttattcagcaaggtatattggtagtttggttggtgattttcacaggacactgttatatggtggcatttatggataccctagggacaagaaaagtaagaatgggaagcttaggcttttatatgaatgtgctccaatgagcttcattgttgaacaggctggtggaaaaggttcagatggtcatcaaagagtacttgacattcaacccacagaaattcatcaacgtgttccactttacattgggagcacagaagaggtggagaaggttgaaaagtacttagcttaa

SEQ ID NO: 183 - protein, 410 aa, Pisum sativa
MVAMAAATASSQLIFSKPYSPSRLCPFQLCVFDAKSVLSSSRRKHVNGSGVRCMAVKEATSETKKRSGYEIITLTSWLLQQEQKGIIDAELTIVLSSISMACKQIASLVQRANISNLTGTQGAVNIQGEDQKKLDVISNEVFSNCLRSSGRTGIIASEEEDVAVAVEESYSGNYIVVFDPLDGSSNLDAAVSTGSIFGIYSPNDECLPDFGDDSDDNTLGTEEQRCIVNVCQPGSNLLAAGYCMYSSSVAFVLTIGKGVFVFTLDPLYGEFVLTQENLQIPKSGEIYSFNEGNYKLWDENLKKYIDDLKEPGPSGKPYSARYIGSLVGDFHRTLLYGGIYGYPRDKKSKNGKLRLLYECAPMSFIVEQAGGKGSDGHQRVLDIQPTEIHQRVPLYIGSTEEVEKVEKYLA

SEQ ID NO: 184 - DNA, 1242 bp, Poncirus trifoliata
atggttgcagcagcagcgacaacatcatcacagcttctcttttcaagctctcactctttctctcggctctctccttaccaaatatgtgtcttcgattccaaagcactcgtgtcgtcatgtcccagcaacgttatgaagagaagacatgttggtgttgctgctggggttcggtgcatggctgttgggacaacatcggaggttgcaaccaagaagagaagttcgtatgagattgaaacgctgacaaactggctgttgaagcaagaacagtctggcgttattgatgctgagctcactattgtgctttccagcatttcaacggcgtgcaagcagattgcttctttggtgcaaagagctggcatttccaacttgactggaattcagggtgctgtcaatgttcaaggcgaggaccagaagaagctcgacgtcgtttcaaatgaggtgttctcaaactgtttgagatcaagtgggcgaactgggattatagcatcagaggaagaggatgtaccagtggcggtagaagagagctactctggaaactatattgtagtttttgatccacttgatggatcatccaacattgatgctgcagtgtctactggatccatctttggcatatacagcccaaatgatgagtgtcttgccgatattggtgatgattctactctgggcaatactgaacaaagatgtgtagtgaacgtgtgccagccaggaagcaaccttcttgctgcaggctattgcatgtattcaagctctgtaatctttgtgataactttaggcaacggagtctttgcattcaccctggatcccatgtatggagaatttgttttgacacaagagaacattcagatacccaaaaccggaaagatctatgcttttaatgaaggcaactaccagctttgggatgacaagttgaagaagtacattgacgatcttaaggatccaggacccagcggcaagccctattctgctaggtacattggcagcttggttggtgatttccatcgaactctgctctacggcggcatttatggctatccaagagacaagaagagcaagaatggaaagctgaggctcttgtatgaatgtgcaccaatgagcttcatagtggaacaagcaggaggcaaaggatctgacggccatcaaagagtacttgacattcaacctactgagattcaccagcgtattcctttaaagattggaagccaggaggaagtggagaaactggagaagtatttggcctaa

SEQ ID NO: 185 - protein, 413 aa, Poncirus trifoliata
MVAAAATTSSQLLFSSSHSFSRLSPYQICVFDSKALVSSCPSNVMKRRHVGVAAGVRCMAVGTTSEVATKKRSSYEIETLTNWLLKQEQSGVIDAELTIVLSSISTACKQIASLVQRAGISNLTGIQGAVNVQGEDQKKLDVVSNEVFSNCLRSSGRTGIIASEEEDVPVAVEESYSGNYIVVFDPLDGSSNIDAAVSTGSIFGIYSPNDECLADIGDDSTLGNTEQRCVVNVCQPGSNLLAAGYCMYSSSVIFVITLGNGVFAFTLDPMYGEFVLTQENIQIPKTGKIYAFNEGNYQLWDDKLKKYIDDLKDPGPSGKPYSARYIGSLVGDFHRTLLYGGIYGYPRDKKSKNGKLRLLYECAPMSFIVEQAGGKGSDGHQRVLDIQPTEIHQRIPLKIGSQEEVEKLEKYLA

SEQ ID NO: 186 - DNA, 1245 bp, Populus tremuloides
atggttgcacaagcagcagcaataacaacttcatcatcacatcttctcttctcaacctcacgctcactgtctcgcccatctccttcccagttatgtgtctttgactcaaaaacacttgtgtcataccccaacagcactagtacttacaagaaaaaacgtggtggtgatgggctcaagtgcatggctgtgagcacagcctcggatgctaaaacaaagaagagtacgtttgagattcaaacactgactggttggctgttgaagcaagaacaagctggtgttattgatgctgagctcactattgttatatcaagcatttcaatggcatgtaagcagattgcttctttggtgcaaagagctagcatttctaacttaactggagttcaaggttctgttaacgttcaaggagaagatcagaagaagcttgacgtggtctctaatgaggtgttctctagctgcttgagatcaagtgggaggacaggaatcatagcatcagaggaagaggacgtgccagtggcagtggaggagagttactctggaaactatatagtggtttttgacccactcgatggatcatccaacattgatgctgcagtgtctactggttccatctttggaatatacagccccaatgacgaatgcctggccgatattggagatgactccactcttgatcaaacggaacagaggtgtattgtgaatgtgtgccagccaggaaataacctccttgttgctggctactgcatgtattcaagctcagtgatttttgtgctaactattggaaaaggcgtgttctctttcagcttggatccaatgtatggagagtttgttttaactcaagaaaacatccagataccaaaggctggaaagatttattcatttaatgaaggaaactaccagttgtgggatgacaagctgaagaagtacattgatgaccttaaagaccctggtccgagtggcaagccctactccgctagatacattggaagcttggtcggtgacttccaccggacgctgctgtacggtggcatttatgggtaccccagggacaagaagagcaagaatgggaagctgaggcttctgtatgagtgtgcaccgatgagctttatagtggaacaagctggtgggaaaggatcagacgggcatcagagagtactggatatcactcctactgagatacaccagcgtgttccgctttacatagggagcgtggaggaagtggagaaattggagaagtatttggcttga

SEQ ID NO: 187 - protein, 414 aa, Populus tremuloides
MVAQAAAITTSSSHLLFSTSRSLSRPSPSQLCVFDSKTLVSYPNSTSTYKKKRGGDGLKCMAVSTASDAKTKKSTFEIQTLTGWLLKQEQAGVIDAELTIVISSISMACKQIASLVQRASISNLTGVQGSVNVQGEDQKKLDVVSNEVFSSCLRSSGRTGIIASEEEDVPVAVEESYSGNYIVVFDPLDGSSNIDAAVSTGSIFGIYSPNDECLADIGDDSTLDQTEQRCIVNVCQPGNNLLVAGYCMYSSSVIFVLTIGKGVFSFSLDPMYGEFVLTQENIQIPKAGKIYSFNEGNYQLWDDKLKKYIDDLKDPGPSGKPYSARYIGSLVGDFHRTLLYGGIYGYPRDKKSKNGKLRLLYECAPMSFIVEQAGGKGSDGHQRVLDITPTEIHQRVPLYIGSVEEVEKLEKYLA

SEQ ID NO: 188 - DNA, 1227 bp, Solanum tuberosum
atggcagcatcagcagccacagcaacagcaacaacttcatatttaagtgctctagacaaaaagactccatttttatttgccttagacaaaaagactccatttttatgcccaaaaagcagcacgaagagaaggtcatttaatggaggagtaaagtgcatggcaatagagacaacttcaggttttacagcaaccaagaaaaggagtggctatgagctgcaaactttaacaagttggctattaagacaagaacaagctggagtgattgatgctgaacttaccatagttatttcaagtatttcaatggcttgtaaacagattgcttccttagtccaaagagctggaatttctaaccttactggagttcaaggtgctgtcaatattcaaggagaagatcagaagaaacttgatgttgtctctaatgaggttttctcaaattgtctaagatcaagtggaaggactgggattatagcatcagaagaagaggatgtacctgtggcagtggaagagagttactcaggcaactacattgtggtgtttgatcctcttgatggatcatcaaacattgatgctgctgtgtctaccggttctatctttggaatatacaacccgaatgatgagtgcctcgctgatcatggagatgattccacgcttgacaatatagagcagaagtgcattgtgaatgtatgtcaaccagggacaaaccttcttgcagcaggatactgcatgtactcaagctctgtgatattcgtactcaccttgggaaatggcgttttttcctttaacttggatccgatgtacggagaatttgttctgactcaagaaaatgtccaaataccaaagtctggaaagatctattcattcaatgaaggaaactaccagctctgggatgacaagttgaagaaatatatcgatgacttgaaggaccctggccctagtggcaagccttactctgcaaggtacattggtagtttggttggtgacttccatagaactcttctatatggtggcatttatggttatcctagagaccaaaagagcaagaatggaaagttgaggcttttgtacgagtgtgctcccatgagcttcattgtggaacaagctggtggtaaaggatccgatggtcaccaaagagttctcgatatccaaccaactgaggtacatcaacgagttccattgtacattggaagcacagaagaagttgaaaaattggagaagtacttgtcttaa

SEQ ID NO: 189 - protein, 408 aa, Solanum tuberosum
MAASAATATATTSYLSALDKKTPFLFALDKKTPFLCPKSSTKRRSFNGGVKCMAIETTSGFTATKKRSGYELQTLTSWLLRQEQAGVIDAELTIVISSISMACKQIASLVQRAGISNLTGVQGAVNIQGEDQKKLDVVSNEVFSNCLRSSGRTGIIASEEEDVPVAVEESYSGNYIVVFDPLDGSSNIDAAVSTGSIFGIYNPNDECLADHGDDSTLDNIEQKCIVNVCQPGTNLLAAGYCMYSSSVIFVLTLGNGVFSFNLDPMYGEFVLTQENVQIPKSGKIYSFNEGNYQLWDDKLKKYIDDLKDPGPSGKPYSARYIGSLVGDFHRTLLYGGIYGYPRDQKSKNGKLRLLYECAPMSFIVEQAGGKGSDGHQRVLDIQPTEVHQRVPLYIGSTEEVEKLEKYLS

SEQ ID NO: 190 - DNA, 1248 bp, Spinacia oleracea
atggcatcaataggaccagcaacaacaactgcagtaaaactgcgtagctcaatcttcaatcctcagtcatctactctttccccgtctcaacaatgcattacatttacaaagtcccttcactcgtttcctactgccacccgacataatgtggcttccggggttcgttgtatggcagccgtaggagaggcggctacagaaacaaaggcaaggactagaagtaagtacgaaattgaaacactaacaggctggctgcttaaacaagaaatggcaggtgttattgatgctgaacttaccatcgttctttctagcatttcattggcttgtaaacaaattgcttccttggttcaacgagctggtatttctaacttgactggaattcaaggtgctgtcaatatccaaggagaggatcagaagaaacttgatgttgtctccaatgaggtgttttcgagctgcttgagatcgagtggaagaacaggaataatagcatcagaagaagaggatgtaccagtggcagtggaagagagttactctggaaactatattgttgtgtttgatccacttgatggttcatccaacattgatgcagctgtctccactggttccatctttggcatttatagccctaacgatgagtgcattgttgactctgatcacgacgatgagtcacagctaagtgcagaagaacagaggtgtgtagtgaatgtatgtcaaccaggggataacctattagcagcagggtattgtatgtactcaagctctgttatcttcgtacttacaattggtaaaggtgtgtatgcattcacattagatccaatgtatggtgaattcgtactcacttcagagaaaatccaaatcccaaaagctgggaagatctattcattcaatgaaggtaactacaaaatgtgggatgataaattgaagaagtacatggatgatcttaaagagccaggagagtcacagaaaccgtactcgtctcgttacatagggagtttagttggggactttcatagaacacttttatatggtgggatttatggttacccaagagatgcaaagagtaagaatgggaaattgaggcttttgtatgaatgtgcacctatgagttttattgttgaacaagctggtggtaaaggttctgatggtcatcaaagaattcttgacattcaacccaccgagatacatcaacgtgtgccactgtacatcgggagtgtggaggaagtagagaaattagagaagtacttagcataa

SEQ ID NO: 191 - protein, 415 aa, Spinacia oleracea
MASIGPATTTAVKLRSSIFNPQSSTLSPSQQCITFTKSLHSFPTATRHNVASGVRCMAAVGEAATETKARTRSKYEIETLTGWLLKQEMAGVIDAELTIVLSSISLACKQIASLVQRAGISNLTGIQGAVNIQGEDQKKLDVVSNEVFSSCLRSSGRTGIIASEEEDVPVAVEESYSGNYIVVFDPLDGSSNIDAAVSTGSIFGIYSPNDECIVDSDHDDESQLSAEEQRCVVNVCQPGDNLLAAGYCMYSSSVIFVLTIGKGVYAFTLDPMYGEFVLTSEKIQIPKAGKIYSFNEGNYKMWDDKLKKYMDDLKEPGESQKPYSSRYIGSLVGDFHRTLLYGGIYGYPRDAKSKNGKLRLLYECAPMSFIVEQAGGKGSDGHQRILDIQPTEIHQRVPLYIGSVEEVEKLEKYLA

SEQ ID NO: 192 - DNA, 1230 bp, Triticum aestivum
atggccgccgcgaccaccaccacctcccgcccgcttctgctgtcccgccagcaggcggcggctagctccctccaatgccgcctccccaggaggcccggaagcagcctctttgccggccagggccaggcgtcgactccgaatgtgcggtgcatggcagtcgtggacacggcctcggcgccggcgccggcggcggctaggaagaggagcagctacgacatgatcacgctgacgacgtggctgctgaagcaggagcaggagggggtcatcgacaacgagatgaccatcgtgctgtccagcatatccacggcgtgcaagcagatcgcctcgttggtgcagcgcgcgcccatctccaacctcaccggcgtccagggcgccaccaacgtgcagggcgaggaccagaagaagctcgacgtcatctccaacgaggtgttctcgaactgcctgaggtggagtggccgcaccggcgtgatcgcatcggaggaggaggacgtgccggtggcggtggaggagagctactcgggcaactacatcgtggtgttcgacccgctcgacggctcctccaacatcgacgccgccgtctccaccggctccatcttcggcatctacagcccatccgacgagtgccacattggcgacgacgcaacccttgacgaagtgacgcagatgtgcatagtgaacgtgtgccagccagggagcaacctgctcgccgccggctactgcatgtactcgagctcggtcatcttcgtgctcaccatcggcaccggggtgtacgtgttcacgctggacccgatgtacggcgagttcgtgctgacgcaggagaaggtgcagatcccaaagtcgggcaagatctactccttcaacgagggcaactacgcgctctgggacgacaagctcaagaagtacatggacagcctcaaggagcccggcacctccggcaagccctactccgcgcgctacatcggcagcctcgtcggcgacttccaccgcaccatgctctacggcggcatctacgggtaccccagcgaccagaagagcaagaacggcaagctgcggctgctctacgagtgcgcgcccatgagcttcatcgccgagcaggccggcggcaaaggctccgacggccaccagagggtactcgacatcatgcccacagcggtccatcagagagtgcctctgtacgtcgggagcgtggaggaagtggagaaggtggagaaattcttgtcttcagagtag

SEQ ID NO: 193 - protein, 409 aa, Triticum aestivum
MAAATTTTSRPLLLSRQQAAASSLQCRLPRRPGSSLFAGQGQASTPNVRCMAVVDTASAPAPAAARKRSSYDMITLTTWLLKQEQEGVIDNEMTIVLSSISTACKQIASLVQRAPISNLTGVQGATNVQGEDQKKLDVISNEVFSNCLRWSGRTGVIASEEEDVPVAVEESYSGNYIVVFDPLDGSSNIDAAVSTGSIFGIYSPSDECHIGDDATLDEVTQMCIVNVCQPGSNLLAAGYCMYSSSVIFVLTIGTGVYVFTLDPMYGEFVLTQEKVQIPKSGKIYSFNEGNYALWDDKLKKYMDSLKEPGTSGKPYSARYIGSLVGDFHRTMLYGGIYGYPSDQKSKNGKLRLLYECAPMSFIAEQAGGKGSDGHQRVLDIMPTAVHQRVPLYVGSVEEVEKVEKFLSSE

SEQ ID NO: 194 - DNA, 1242 bp, Zea mays
atggccgccgccgccaccacctcctcatcctcccacttgctcctcctctcccgccagcaggcggcctccctacgatgccgcctctccttcctcggccagcccgccagaaggtccggcagggtcacggcccaggcgccggccgctaaggacgtgcggtgcatggcggccgtggacactgcggcgtccgcggcggcggcggagacgagccccaagtcgagcagctacgagatcgtgacgctcacgacgtggctgctgcagcaggagcggaccggcgcgatcgacaacgagatgaccatcgtgctggccagcatatccacggcgtgcaagcagatcgccgcgctggtgcagcgcgcgcccatctccaacctcacgggcgttcagggcgccgtcaacgtgcagggcgaggaccagaagaagctcgatgtcgtctccaacgaggtgttctccaactgcctcaagtcgagcgggcgcaccggcgtgatcgcctcggaggaggaggacgtgcccgtagcggtggagcagagctactccggcaactacatcgtcgtgttcgaccctctcgacggctcctccaacatcgacgccgccgtctccactggctccatcttcggcatctacaaccccaacgacgagtgcctcgccgacgtcgacgacaacgacacccttgattcggtggagcagaggtgcatcgtgaacgtgtgccagccggggagcaacctgctggccgccggctactgcatgtactcgagctcggtgatcttcgtgctcaccgtcggcaccggggtgtacgtgttcacgctggaccccatgtacggcgagttcgtgctgacgcaggagaaggtgcagatccccaaggcgggcaagatctacgccttcaacgagggcaactacgcgctctgggacgacaagctgaagctgtacatggacagcctcaaggagcccggcgactcggggaagccctactccgcgcggtacatcggcagcctcgtcggcgacttccaccgcactctgctctacggagggatctacgggtaccccagggacaagaagagcaagaacggcaagctgcggcttctctacgagtgcgcccccatgagcttcatcgtcgagcaggccggtggcaagggctctgacggccaccagagaattcttgacatcacacctacagagatccaccaaagagtgcctctgtacattgggagcgtggaggaagtggacaaggtggagaaattcctggcttga

SEQ ID NO: 195 - protein, 413 aa, Zea mays
MAAAATTSSSSHLLLLSRQQAASLRCRLSFLGQPARRSGRVTAQAPAAKDVRCMAAVDTAASAAAAETSPKSSSYEIVTLTTWLLQQERTGAIDNEMTIVLASISTACKQIAALVQRAPISNLTGVQGAVNVQGEDQKKLDVVSNEVFSNCLKSSGRTGVIASEEEDVPVAVEQSYSGNYIVVFDPLDGSSNIDAAVSTGSIFGIYNPNDECLADVDDNDTLDSVEQRCIVNVCQPGSNLLAAGYCMYSSSVIFVLTVGTGVYVFTLDPMYGEFVLTQEKVQIPKAGKIYAFNEGNYALWDDKLKLYMDSLKEPGDSGKPYSARYIGSLVGDFHRTLLYGGIYGYPRDKKSKNGKLRLLYECAPMSFIVEQAGGKGSDGHQRILDITPTEIHQRVPLYIGSVEEVDKVEKFLA

SEQ ID NO: 196 - DNA, 1266 bp, Physicomitrella patens
atggcgaccacacaagcgattctctctgccacccttgccatagccccggcttccagctgcgagacttcgtcacggagcccggcgtccaccaaaacttgtctctcagtggcaggatcgtcgctgcatggctcagtggccggactcggagctgggaaacagattgtgagcgtgcagaggaagagcgttgccgtgagggccgccgttgcagctgagactgccgctcccaagcagcaggcgaagagccagtatgacatcactaccctgacgacgtggttgctgaagaaagagcaggcgggcgtcatcgatggcgagctcaccattgtgctctccagcatcgccctggcttgcaagcaaattgcgtctctggtgcagagggctggcatctccaacatgactgggttgcaaggagctgctaacattcaaggggaggaccagaagaagctagacgttatttcgaacgaggtgttctcaagctgtctgcgctcaagcggacggacaggcatcatcgcttctgaggaagaagacaccccggttgcagtggaggagagctactctggcaactacattgtggtgttcgaccctcttgacggctcttccaacatcgatgctgctgtttccacggggtcaatctggggaatctacaagcccaacgaggaatgcctgaccaatctcggagaggagccaactattgatgagatcgccgaaaactgcgtcgtcaatgtctgtcaaccagggagcaatttgttgtccgccgggtactgcatgtactcgagctccgtcatcctcgttctctcagtcggtgatggagtctacggcttcactctggaccctctctacggagaattcgtcctctcgcacgacaacatccaaattccaaaatctggtaagatctattccatgaatgaaggcaactacgccctctgggatgacaacctcaagaagtacgtcgacagcttgaaggaccccggtcccagcggcaagccctactccgctcgttacatcggcagtctggtgggcgacttccacaggacaatgctgtatggtggcatctatggctaccccagggattccaagagcaagaacgggaagttgaggttgctttacgagtgtgctcccatgagctacctcgctgaacaagcaggtgggaagggctccgacggtcaccagaggattctggacatccaacctgagcaggttcaccaacgtgtgccattgtacgttggaagcacggaggaggtggagaagttggagaagttcttagcttaa

SEQ ID NO: 197 - protein, 421 aa, Physicomitrella patens
MATTQAILSATLAIAPASSCETSSRSPASTKTCLSVAGSSLHGSVAGLGAGKQIVSVQRKSVAVRAAVAAETAAPKQQAKSQYDITTLTTWLLKKEQAGVIDGELTIVLSSIALACKQIASLVQRAGISNMTGLQGAANIQGEDQKKLDVISNEVFSSCLRSSGRTGIIASEEEDTPVAVEESYSGNYIVVFDPLDGSSNIDAAVSTGSIWGIYKPNEECLTNLGEEPTIDEIAENCVVNVCQPGSNLLSAGYCMYSSSVILVLSVGDGVYGFTLDPLYGEFVLSHDNIQIPKSGKIYSMNEGNYALWDDNLKKYVDSLKDPGPSGKPYSARYIGSLVGDFHRTMLYGGIYGYPRDSKSKNGKLRLLYECAPMSYLAEQAGGKGSDGHQRILDIQPEQVHQRVPLYVGSTEEVEKLEKFLA

SEQ ID NO: 198 - DNA, 1263 bp, Galderia sulphuraria
ggcacgaggaaagatgtgcaagtatactttattcaagtcctactatatctttacaaagaagagtgtcaagaaataaccactgcaaaagatatcttccttataagatggatatccatcaaaatgatagctgttcaaccccaacccaaaaagactcccgtagcagaatatttacaaacctcacaagacacaccaacttcactcactcgttacttgttggaagtagccaaacaaaataaggatatgggagatatggtggcattgataaacggtattcaatttgcttgcaaaaagatagcttcattggttggtaaagcaggggtcactgacttgatgggaatctatcaacaaggcatagtcaacgttcacggagaagaacagaaaaagttggatgttctttctaatgaagtattgaagaacgctctcaaatattcgggaaaaatggctgtcatagcttcggaagaagaagacgttcctatcatggtagaagaaagttattccggtaactatgtagtcgtgtttgatccattagatggttcttccaatttggatgctggattgcctactggaactatatttggagtgtttcaacaacaattctcgtgtctcattcatgactatgaggagtccatcgataacatggaattggcttgtttacaaaacactttacaaccaggacgtagattgattgccgctggatattgtatctattcttcttctaccatgttggtactctcattgggtaatggtcttcattgttttactttggatacggaagttggtgaatttgtattgactcgtgctaacatccaaattccacaaagaggtaatatttattctttcaacgagtccaacttttatcaatgggataaaggagttcaagattatatagagaggttaaaaaaaggaaacaatcaaacaaattgtcgttattccgcaagatatgttggctccatggttgctgatgtacatcgtacaatattgtatggcggaatatttggttatccagcagataaaaagaatgtctctggtaaattgagattggtatatgaatgtgcaccgatggcatatttggttgaacaagcaggaggtaaagcaaccacgggaatagaaaatattttagatttgacaccaaaagatattcacgaaaggaagcctcttatattaggttctccagcagatatcgaagaatttctgcaagtatatggaatgtcacgagttgatagagaagatatgcatatgtgggataacttgagtagtttataa

SEQ ID NO: 199 - protein, 420 aa, Galderia sulphuraria
GTRKDVQVYFIQVLLYLYKEECQEITTAKDIFLIRWISIKMIAVQPQPKKTPVAEYLQTSQDTPTSLTRYLLEVAKQNKDMGDMVALINGIQFACKKIASLVGKAGVTDLMGIYQQGIVNVHGEEQKKLDVLSNEVLKNALKYSGKMAVIASEEEDVPIMVEESYSGNYVVVFDPLDGSSNLDAGLPTGTIFGVFQQQFSCLIHDYEESIDNMELACLQNTLQPGRRLIAAGYCIYSSSTMLVLSLGNGLHCFTLDTEVGEFVLTRANIQIPQRGNIYSFNESNFYQWDKGVQDYIERLKKGNNQTNCRYSARYVGSMVADVHRTILYGGIFGYPADKKNVSGKLRLVYECAPMAYLVEQAGGKATTGIENILDLTPKDIHERKPLILGSPADIEEFLQVYGMSRVDREDMHMWDNLSSL

SEQ ID NO: 200 - DNA, 710 bp, Marchantia polymorpha
gaggaggataccccagtcgccgtcgaagagagctactcaggaaactacgtcgttgtcttcgatcctctcgatggatcctccaacatcgacgctgcggtatctaccggatccatctttggaatctacaggcccactgaggagtgtcttgcagacatggacgacgactcacagctcggtatggtggaacaaaactgcatcgtgaacgtatgccagcccggtagcaacctcctatccgctgggtactgcatgtactccagctccgtcattttggtgttgtcagtcggagacggtgtctatggattcacactggatcccctgtacggtgaattcgtcatgacccacgacaacatcaagatcccaaagaagggatcgatctactcgttcaatgaaggtaactacgcactctgggatgacaagctcaagaagtacatcgactcactgaaggaccccgaacccaccggcaagccttactctgctcgttacatcggtagtctggtcggtgacttccacagaaccatgctctatggtggcatctacggataccctgccgacaagaaaagcaagaacggaaagttgagacttctgtacgagtgtgctcctatgagctacttggcagagcaggccggaggaaagggttctgatggttaccgcagagttctggaaatcgagcctgagcaggtacatcagcgagtgccacttttcgtcggaag

SEQ ID NO: 201 - protein, 236 aa, Marchantia polymorpha
EEDTPVAVEESYSGNYVVVFDPLDGSSNIDAAVSTGSIFGIYRPTEECLADMDDDSQLGMVEQNCIVNVCQPGSNLLSAGYCMYSSSVILVLSVGDGVYGFTLDPLYGEFVMTHDNIKIPKKGSIYSFNEGNYALWDDKLKKYIDSLKDPEPTGKPYSARYIGSLVGDFHRTMLYGGIYGYPADKKSKNGKLRLLYECAPMSYLAEQAGGKGSDGYRRVLEIEPEQVHQRVPLFVG

SEQ ID NO: 202 - DNA, 765 bp, Tagetes patula
atcattgcatcggaggaagaagacgtgccggtggctgtggaagagagttactccggaaactacattgtcgtgtttgatccccttgatgggtcatctaatattgatgctgctgtttcaaccggttctattttcggaatctatagccccaatgatgagtgtctcgctgatattagtgacgactccacgctagacagtgtggaacaaaaatgtattgtcaacgtatgccagcccggaagcaatctactagcagccggttactgtatgtactcaagctccgtaatcttcgtgctctcgatcggtactggtgtctacgcgttcacattagacccaatgtacggtgagtttgtactcactcaagaaaagattcaaatcccgaaatcggggaagatttactcgtttaacgaaggaaactatcaactatgggacgataaattgaagaagtacatggatgatctaaaggacccgggccccacgggcaagccgtattcggctcgctacattggtagcttggttggtgattttcataggacattattgtacggagggatttacgggtacccacgtgacaaaaagagcaagaacgggaagcttcggttgttgtatgagtgtgcaccgatgagttacttggttgaacaagcgggtggaaaggggtcggatggacatcaacgagtgctcgacattcaaccaaccgagattcatcagcgcgttccgctatacattgggagcgtagaggaagtggaaaaattggagaagtatttggcttga

SEQ ID NO: 203 - protein, 254 aa, Tagetes patula
IIASEEEDVPVAVEESYSGNYIVVFDPLDGSSNIDAAVSTGSIFGIYSPNDECLADISDDSTLDSVEQKCIVNVCQPGSNLLAAGYCMYSSSVIFVLSIGTGVYAFTLDPMYGEFVLTQEKIQIPKSGKIYSFNEGNYQLWDDKLKKYMDDLKDPGPTGKPYSARYIGSLVGDFHRTLLYGGIYGYPRDKKSKNGKLRLLYECAPMSYLVEQAGGKGSDGHQRVLDIQPTEIHQRVPLYIGSVEEVEKLEKYLA

SEQ ID NO: 204 - DNA, 795 bp, Linum usitatissimum
  misc_feature (738)..(738): n is a, c, g, or t
gaggaggaacaacgtcgccgggggttctggtttcaaatgctctgccgtcgggacgcgccgtcggaggcggcaacgacgacgaagaagaggagtagctacgagattctgacgctgacgacctggcttctgcagcaggaacaggccggagtgatcgacgccgagctcacgattgtgctctccagcatctccacggcgtgtaagcagatcgcttctctagttcagcgatccgggatttctaacctcaccggcgtccagggcgccgtcaatgtccagggtgaggatcagaagaagctcgacgtcgtttcgaacgaggtgttttcaaattgcttgaggtcgagcggcaggacggggatcatagcgtcggaggaagaagacgtgccggtcgccgtggaggaaagctactccggtaactatatcgtagtgttcgatccacttgatggatcgtcaaacatcgatgccgcagtctccaccggctcaatcttcggaatctacagtcccaacgatgagtgcctggccgacatcggagacggagacgagtcaaatctagatactcaggagcagaagtgtgtggtgagcgtgtgccagccggggagcaacctactcgccgccggctactgcatgtactcaagctcggtgatcttcgtcctcacgatcggaaacggcgttttcgccttcaatctggacccaatgtacggcgagttggtgttgactcaagagaacattcagatcccgaaagcnggaaagatctactcattcaacgaaggggactaccaaatgtgggatgagaaattgaag

SEQ ID NO: 205 - protein, 265 aa, Linum usitatissimum
EEEQRRRGFWFQMLCRRDAPSEAATTTKKRSSYEILTLTTWLLQQEQAGVIDAELTIVLSSISTACKQIASLVQRSGISNLTGVQGAVNVQGEDQKKLDVVSNEVFSNCLRSSGRTGIIASEEEDVPVAVEESYSGNYIVVFDPLDGSSNIDAAVSTGSIFGIYSPNDECLADIGDGDESNLDTQEQKCVVSVCQPGSNLLAAGYCMYSSSVIFVLTIGNGVFAFNLDPMYGELVLTQENIQIPKAGKIYSFNEGDYQMWDEKLK

SEQ ID NO: 206 - DNA, 50 bp, Artificial sequence
  primer: prm08448
ggggacaagtttgtacaaaaaagcaggcttaaacaatggccgccaccatg

SEQ ID NO: 207 - DNA, 50 bp, Artificial sequence
  primer: prm08449
ggggaccactttgtacaagaaagctgggtagctgcttagtgcttcttggt

SEQ ID NO: 208 - DNA, 1167 bp, Oryza sativa
atccaagccaagaagagggagagcaccaaggacacgcgactagcagaagccgagcgaccgccttcttcgatccatatcttccggtcgagttcttggtcgatctcttccctcctccacctcctcctcacagggtatgtgcccttcggttgttcttggatttattgttctaggttgtgtagtacgggcgttgatgttaggaaaggggatctgtatctgtgatgattcctgttcttggatttgggatagaggggttcttgatgttgcatgttatcggttcggtttgattagtagtatggttttcaatcgtctggagagctctatggaaatgaaatggtttagggtacggaatcttgcgattttgtgagtaccttttgtttgaggtaaaatcagagcaccggtgattttgcttggtgtaataaaagtacggttgtttggtcctcgattctggtagtgatgcttctcgatttgacgaagctatcctttgtttattccctattgaacaaaaataatccaactttgaagacggtcccgttgatgagattgaatgattgattcttaagcctgtccaaaatttcgcagctggcttgtttagatacagtagtccccatcacgaaattcatggaaacagttataatcctcaggaacaggggattccctgttcttccgatttgctttagtcccagaattttttttcccaaatatcttaaaaagtcactttctggttcagttcaatgaattgattgctacaaataatgcttttatagcgttatcctagctgtagttcagttaataggtaatacccctatagtttagtcaggagaagaacttatccgatttctgatctccatttttaattatatgaaatgaactgtagcataagcagtattcatttggattattttttttattagctctcaccccttcattattctgagctgaaagtctggcatgaactgtcctcaattttgttttcaaattcacatcgattatctatgcattatcctcttgtatctacctgtagaagtttctttttggttattccttgactgcttgattacagaaagaaatttatgaagctgtaatcgggatagttatactgcttgttcttatgattcatttcctttgtgcagttcttggtgtagcttgccactttcaccagcaaagttc

SEQ ID NO: 209 - DNA, 1629 bp, Oryza sativa
atgatgggttgcttcactgtcctgagatccaagaagaagaagcctcttgctctcaccaagaaatcggttgatgcaagggaaagcacgtcctcaagactcccagagccagaagcgcatgtgccatcgttacaatctgctcctcctagttttaggaacaaggctaaaatccaccaatcggaaaagaaagcttcttacagcagagcgcgcgtgctgtctgctccttccagcctaattgtggttgatcaggatggtcttccatatgccgaattcgatgatcaagatgactccaggggcaagggaggttctataaagggccaccgtttctctaatccactgccccttcctctcccatcaccagaaggaaaatcattgaggaactttggcagcttcaaagccatcaatgcaagtggaccactcgatgcttcaggccctctgccacttcctccaaagaagtgtgatgggcttaagaatttctcctatgaggaactttcatcagcttgccaatggttttctggtgaccagtgtgtttccgaaagtttgacatcaacatcatacaaggcgtcctttagggatgattttaccgacccaaagaccattgaagcaatagtatctcggttgctctcctccactcagagtttgaaagagtttaaaacacaagtgaataccttggcatcacttcagcatcccaacttatgtaaactaatcggctttcacgcaagagaagaatctaatgaaaggatgttggtctatgagcgactccatcatggcagcttagataaactactctttggaagatcggatggtcgtttcatggactggtcagcacgtttgaaggttgctcttggtgctgctagaggcctggctttcctacatgatgaagggccttttcaggccatgtacaatgacttctcaacctcaaacatccaaattgacaaagatttcactgcaaagctatcaggatatggatgtgttggattcaataccgaggaggaaatatcaaatgcatctgtggctgctgcaaacctctcagtggaaaccttggagaaaggtgtactgactcccaagagcaacgtatggtgctttggagttgtcctgctggagctaataacaggaaggaagaaccttgatgtccgttcctcaaaagaagaacgcaatattgtcaagtggagtaggcctttcctcaccgatgatagtcgcctatcgttaatcatggactcccgtataaaaggacgcttccctaccaaggctgctcggattgtagcagatatcatattgagatgccttaataaagatccatcagagaggcctaccatgagggccgttgtggagtccctagcaagcgtccaggacataaaggttccatgtcgatatcctttgcaagagccatctgctgccccaagaaaggtgatgttaaaatctacaagtctcaatggcatcattcatcaccatcctgtcgtaaccttctcaccgtcacctccttcgcgaaaccaacatttgctctcgccaaggtcatccacgtctgcactgcttcctccaaggaccagctgtgctctggatgaccctagagtaagctctatcaagaaatcgccttcccctattttacggagatctggtgttgagggtttttga

SEQ ID NO: 210 - protein, 542 aa, Oryza sativa
MMGCFTVLRSKKKKPLALTKKSVDARESTSSRLPEPEAHVPSLQSAPPSFRNKAKIHQSEKKASYSRARVLSAPSSLIVVDQDGLPYAEFDDQDDSRGKGGSIKGHRFSNPLPLPLPSPEGKSLRNFGSFKAINASGPLDASGPLPLPPKKCDGLKNFSYEELSSACQWFSGDQCVSESLTSTSYKASFRDDFTDPKTIEAIVSRLLSSTQSLKEFKTQVNTLASLQHPNLCKLIGFHAREESNERMLVYERLHHGSLDKLLFGRSDGRFMDWSARLKVALGAARGLAFLHDEGPFQAMYNDFSTSNIQIDKDFTAKLSGYGCVGFNTEEEISNASVAAANLSVETLEKGVLTPKSNVWCFGVVLLELITGRKNLDVRSSKEERNIVKWSRPFLTDDSRLSLIMDSRIKGRFPTKAARIVADIILRCLNKDPSERPTMRAVVESLASVQDIKVPCRYPLQEPSAAPRKVMLKSTSLNGIIHHHPVVTFSPSPPSRNQHLLSPRSSTSALLPPRTSCALDDPRVSSIKKSPSPILRRSGVEGF

SEQ ID NO: 211 - DNA, 1674 bp, Arabidopsis thaliana
atggttttggggtgtttccctttgaaaagcaagaagaaacgtggctctgtttctatgaagcggttggatcttgaagaaagcaagccaactgctttacctgagccaccaaagattccaagtcgtaatttacaatcaggtcctccgagtttcagaaatcgtgtgaagccaattcaatcaaacaacggtggaaacggagagatgagtagccgagcaagagtcatgtttgctccgtcaagcatccacggtgcagcggaacgggatttgcttgctggtgtttaccacgacgagcaagatgaacaaccaagagatccacgtacttctactaaagaatctagccctcaaccacttccgttaccgtcaccaagaactggttcttcattgaagaattggggaagctttaagtcgtttaacggaagcagcggtcggttatcatcatccgcagctgtatctggacctttacctttgccacctagcgggtcagttaggagcttttcatatgatgaagtaatggctgcgtgtaacgctttttcttcagaccgatgtgtcatggaaggtctttcatctgttatgtacatggcttcctttggtgatgaggcttcgacctcaggtttaaagaaggttgacgcaactgttgtacgacttcacgtaactactcagagtattagggagttcattaatgaagtcaacacattggcgtcgctgcaacaccagaacctttgtaagctggtaggctatcatgctcgtgacggttctgacacaagaatgttggtgtacgagaggcttgctctgggcagcttggaccgtttactgcatgggagatcagatgggcctcctcttgattggaacactagaatgaagattgcactatgtgcagctcagggtctaaccttcttgcacgaagaaggcccttttcaggcaatgtacaatgaattttcgacggcaaatatccaagtcgataaagatttcagcgccaagctatcaggatacggttgtgcaggccatgcgcctgagacagagacatctaatagttcggcacttgctaatctctctgtcgagactctagagagagggcttttgaccccgaagagcaatgtgtggagctatggaatagttcttcttgagatgttaacgggtcggaaaaatatggacgggtcttacccgaaagaagagaggaacttagtgaaatggagcagagcttttctagcagatgattgcaggctctcgcttataatggatcctcagcttaaaggtcggtttccggcaaaagcggcgaggagcatagcagatatagcacagaaatgtctgcaggtggagccatcagagcgtccaaccatgagaaacatcgtggatcaactcaagatcatacaggacatgaagtactcgtgtaggttcccgttaagagaacccgcaccagtcgcggcaaggaaacatatgggaagatcaagcagtctcaacacgattatttggaccccggcatcagtgccaccaaggtcaagtttttcaccgtcacctccaccacgacgaccgtctgtttcacccacaaggggacggacgctcgtgtttcccccagtgtttccgccgcgagcgtgttcatctttggaggaaatggctcgggaagaggttcgaagatcgtcttcagccagtggtaggagaactagcctcgaagggttttga

SEQ ID NO: 212 - protein, 557 aa, Arabidopsis thaliana
MVLGCFPLKSKKKRGSVSMKRLDLEESKPTALPEPPKIPSRNLQSGPPSFRNRVKPIQSNNGGNGEMSSRARVMFAPSSIHGAAERDLLAGVYHDEQDEQPRDPRTSTKESSPQPLPLPSPRTGSSLKNWGSFKSFNGSSGRLSSSAAVSGPLPLPPSGSVRSFSYDEVMAACNAFSSDRCVMEGLSSVMYMASFGDEASTSGLKKVDATVVRLHVTTQSIREFINEVNTLASLQHQNLCKLVGYHARDGSDTRMLVYERLALGSLDRLLHGRSDGPPLDWNTRMKIALCAAQGLTFLHEEGPFQAMYNEFSTANIQVDKDFSAKLSGYGCAGHAPETETSNSSALANLSVETLERGLLTPKSNVWSYGIVLLEMLTGRKNMDGSYPKEERNLVKWSRAFLADDCRLSLIMDPQLKGRFPAKAARSIADIAQKCLQVEPSERPTMRNIVDQLKIIQDMKYSCRFPLREPAPVAARKHMGRSSSLNTIIWTPASVPPRSSFSPSPPPRRPSVSPTRGRTLVFPPVFPPRACSSLEEMAREEVRRSSSASGRRTSLEGF

SEQ ID NO: 213 - DNA, 2069 bp, Sorghum bicolor
ctactggattaaccccccgcgtgcgttccctccctctgtcagtctgtctctctcttggcgtcgactgggcgaccgtcgcagccgccctaagccaggtacccagaccatcttcgggcccttcgccggcgacgagcaccaccaggaattttcccagctgtagcaatgatgggttgcttcactgttctcagatccaagaagaagaaaatcccttttgataatcctcttcttccaagcaagaaatcggttgatgcaagggaaagtacgtcgtctagacttccggaaccagaagttcatgtgccatctttgcaatcagctctctcctagttttaggaacaggactaagatatcccagtcgtcaaataaagtttcaaacagcagagctcgcgtgttgtctgctccgtcaacccttattgtggttgatcagtttggctttccatatgctgaataccgagatcaagacgactccagagataaggaaggttcaacaaaggggcatcgcttttcaaatcctttgccccttcctcttccttcaccggaaggacattcttttaggaactctggtagcttcaaagctagcaacgtaagtgggccattggagatgtccagccctctcccattgcctccaaagaaatgtgatggacttagaatcttttcttacgaggaggttttgtctgcttgccaatggttttcaagtgatcagtgtgtttcagaagcacttggttcaacatcatacaaggcaacatttagggatgaatttattgatacaaagaccactgaagcaacggtagctcgattactcccctccactcagagtttgaaggagtttaaaacacaagcaactacattggcattgcttcagcatcccaatttatgtaaactgattggctattatgcaaaagaagattctaatgaaaggatgttggtctatgaacggcttcatcatgggagcttagataagctactctttggaagaccagatggtcgtttcatggactggtctaaacgtttgaaggttgcccttggtgcggccagaggtcttgctttcttgcatgatgaaggaccctttcaggccatgtacagcgagttctcaactttgaacatccaaatagataaagatttcactgctaagctttcaggatatggttgtgttggcttcaatactgaggagatatctaatgcacctgcgtctgcagcaaacctttcggtggagaccttggagaagggtttactcactcccaagagcaatgtctggagctttggagttgtgttactggagctaataactggaaggaagaaccttgatgccaattcttctaaagaagaacgcaatattgtcaggtggagtaggcctttccttactgatgatagtcgcctatctctgatcatggactcccgtataaaagggcgctttcctactaaggctgctcggatagtagcagacatcattctgaaatgcttgcataatgatccatccgagaggccgaccatgagggatgttgtggaggctctagcaagagtccaggagataaaggttccgtgcagatatcctttgcaagaaccttctgctgcaccaagaaaagtaatgctaaaatctacatccctcaatggaattgtgcctcatcatcctgtcataaccttctctccatcgccgccttcgcataaccagcacttgatttcaccaaggtcatcaacatctgccttgtttcatccaaggacatgctcttctactctggatgatcccggtgtaagctctataaagaaaacacctcctattatgcgtaggtctagcgttgaaggcttttgattgtccatattgttcttttatttctttttctcggatttatttgtttctttgttagcctagtgattttagctgtgttctgtattgtaagacaagtggccttatgtagtgcccttgagtctcgagtaataactaagcagagcaggatgaattgtaaatagtatcaggttgtagatacctttttgtgctctaattgggtggaagcagcgtgctgagtctgagtaggccttgtaacctcataaataaactcgtttcccagtttctgtcc

SEQ ID NO: 214 - DNA, 1360 bp, Saccharum officinarum
agaaacacttggttcaacatcatacaaggcaacatttagggatgaatttattgatacaaagaccactgaagcaacggtagctcgattactcccctccactcagagtttgaaggagtttaaaacacaagcgaccacattggcatcacttcagcatcccaatttgtgtaaactgattggctattatgcaaaagaagattctaatgaaaggatgttggtctatgaacggcttcatcatgggagcttagataagctactctttggaagaccagatggtcgtttcatggactggtctaaacgtttgaaggtttcccttggtgctgcccgaggtctagctttcttgcatgatgaaggaccctttcaggccatgtacagtgagttctcaactttgaacatccaaatagataaagatttcactgctaagctttcaggatatggttgtgttggcttcaatactgaggagatatctaatgcacctgcgtctgcagcaaacctttcggtggagaccttggagaagggtttactcactcccaagagcaacgtctggagctttggagttgtgttactggagctaataactggaaggaagaaccttgatgccaattcttccaaagaagaacgcaatattgtcaggtggagtaggcctttccttactgatgatagtcgcctatctctgatcatggactcccgtataaaagggcgctttccaactaaggctgctcggatagtagcagacatcattctgaaatgcttgcataaagatccatcagagaggccgaccatgagggatgttgtggaggccctagcaagagtccaggaaataaaggttccatgcagatatcctctgcaagaaccttttgctgcaccaagaaaaataatgttaaaatctacatccctcaatggaattgtgcctcatcatcctgtcataaccttctccccttcgccgccttcacataaccaacacttgatttcaccaaggtcatcaacatctgccttgtttcatccaaggacatgctcttctactctggatgatcccggtgtaagctctataaagaaaacacctcctattatgcgtaggtctagcgtcgaaggcttttgattgtccatattgttcttttatttccttttcttggatttattagtttctttggtagcctagtgattctagctatgttctgtattgcaagacaagcggccttaatgtagtgcccttgggtctagagtaataactaagcagagcaggatgaattgtaaataggatcaggttgtagatacctttttgtgctctaattgggtggaagcagcgtgctaagtgagccttgtaacctcccaatgcaataaactcgtttttcagtttttgttc

SEQ ID NO: 215 - DNA, 2062 bp, Medicago truncatula
acgaggctattctctctctttctctctctacatttctcaacattcttcaaatttctctctccaaaaccttcacttcgcagctttttcaatctgctttctttgactctgtaacagtttttttcgtggaagaatcagaaccacaaaaaagtttcgatttttacccatttcttcaacccgtgatcgcttcactgtaattggcatgagcttccatttctcgttctgacaaaaacaggtatctataacatcctagttctgtacatagaatggggtgttttactatattgaagagaaagaagaaaaagcctgatcagattgtgtatgtaaaacgcgtaagccctggcgaagattcacctacagtactgcccgaaccccaaactcatacccgctcactccagtctgcgcctcctagttttaagatcagagtgaaacccattcaacctagcaataaagccactaacaatagaatacgagcattgtctgctccatcgagtcttgatgatgcagaacaagatgcattggccaccattgagtatgaagaacaagaagggtcaaaataccgaactggatcatggaaggagcagcgttcgcctagtccacaaccattaccgcttccatctcctaagggtggtggtacattgaagactgttggaagctttaagttggggatagctagtagtcctttatatgcttctggacctttgccgcttccaccaactgggtcactgagaaacttttcttatgatgaacttgctgctgcttgcctcaatttctcttcagatcgatacatgtcagaatctctttcatccaccatgtataaagcttcctttggtgatgatacctcaacttcaagttcaaagaagtttgaagctactgtcacacgccttcgcccatcatctcagggcctgaaggaattcataaatgaggttaatactcttgcatcattgcagcatccgaacctctgtagattgctaggatttcacgcaggtgatggttcagagcatagaatgttggtttatgagaggctataccatggaagcttggaccgcttattgtatgggagatctgatgggccatcaattgattggaatacaagaatgaaaattgcaatatgtgctgcactaggtctttctttcttgcatgaagaagggccttttcaggcaatgtataatgaattttcaacagctaacattcagattgacaaagatttcagtgcaaagctttcaggatatggttgtgttggacatgttccgaaggaagagatttcaagcagttcatctgccgttggaaacctatcgatggagacactggagaaaggaatgcttactccgaaaagcaatgtatggagtttcggaattttccttctagagctacttacaggaagaaagaatctcgatagcccgtcacccaaaggaagagagaaatttggtgaagtggagcaggcctttcctgtctgataatcatcgtttgtcaatgatcatggatcctcaacttaaaggtcgctttccttctaaagcggcgagtacaatagctaacattgcacaaagatgccttcaaatggagccatcagaacgaccaaccatgggaacagttgttgagcagctgaaaaagatacaagatttgaagcattctagcagattcccgctgcaagaacctgcacaaatgtcgagatcaccaagtcttaacggtatcaaccaccctgcaccaaggccgagtttctctccatcaccatcatccagagccctggtatctgtctcacctccaagatggtcgggagtgtcaattcaacttccacctcgcgcgttttcttcaaccctctatttggaggagcttgataggcaagaaagccgcaagtcagcttcagcctctaggaaggctagtgttgaaggattttgattgtcgatagtgttcattttttatttgttattctttttttggtgtagttcaacagagatttataggagataaagatttgtaatcatccctcagtgtgatgcagagaggatgctcttttgtacatagtgcaaaggttggtccccttggttcaattagttactccattttg

SEQ ID NO: 216 - DNA, 2039 bp, Zea mays
ctcccccggcgtgcgctccctcctgtctctcttggcgacgactgggcaacggtcgcagctgtatgttcgagcccttcgccgacgacgttcaccaccaggaattttctcagctgtgccaatgatgggttgcttcactgttctcagatccaagaagaagaaaagccattttgataatcctcttgtcccaagcaagaaatcagttgatgcaagggaaagtacgtcctctagacttccggagccagaagttcatgtgccatctttgcaatcagctcctcctagttttaggaacagggtcaagatatccgagtcatcaaatgaagtttcaaacagaaacagcagggctcgcgtgctgtctgctccatcagcccttattgtggttgatcagtttggctttccatattcggaataccgagatcaagatgactccagggataaggaaggtttgacaaaggggcatcgcttttcaaatcctttgccccttcctcttccttcacgcgaaggacattcttttaggaactctggtagcttcaaagccagcaacgtaagcgggccattggagatgtctggccctctcccattgcctctaaagaaatgtgatggacttagaatcttctcttatgaggagatttcatctgcctgccaacgattttctagtgatcagtgtgtttcagaaacacttggttcaacatcatacaaggcaacatttagagatgaatttattgatacgaggaccactgaagcaacagtagctcgattactcccctccactcagagtttgaaggagtttaaaacgcaagcgaccacattggcatcgcttcagcatcccaatttatgtaaactgattggctattatgcaaaagaagattctaatgaaaggatgttggtctatgaacggctttatcatggaagcttagataagctactctttggaagatcagatggtcgtttcatggactggtctaaacgtttgaaggttgccctgggtgctgccagaggtctagctttcttgcatgatgaaggaccctttcaggccatgtacagcgagttctcaactttgaacatccaaatagataaaggtttcactgctaagctttcaggatatggttgtgttggcttcaataccgaggagatatctaatgcacctgtgtctgcagcaaacctttcggtggagaccttggagaagggtttactcactcccaagagcaacgtctggagctttggagtcgtgttactggagctaataactggaaggaagaaccttgatcccaattattccaaagaagaacgcaatattgtcaactggagtaggcctttccttactgatgacagtcgcttgtctcttatcatggactcccgtataaaagggcgctttcccactaaggctgctcggatagtagcagacatcattttgaaatgcctgcgtaaggatccatcggagaggcctaccatgagggatgttgtggaggccctagcaagagtccaggaaataaaggttccgtgcagatatcctctgcaagaaccttctgctgcaccaagaaaagtgatgttgaaatctacatccctcaatgggattgtgcctcaccatcctgtcataaccttctctccatcgccgccttcacataaccagcacttgatttcaccaaggtcgtcgacatctgccttgtttcatccaagggcatgctcttctaccctggacgatccgagtgtaagttctataaagaaaacaccacctattatgcgaaggtctagcgtcgaaggcttttgattgtccatattgttcctttatttccttttcttggatttatttgtttctttgttagtagtgtagcggtttttagctgtgttctgtattgtaagacaagtggcctcatatgtagtgcccttgggtctggagtaaagcagaacaggatgaattgtaaataggaccaggttgtagataccttttttttgtgctcgaattgggtggaagcagcgtgccgagtgggccttgtaacctcataatgcaataaactccgtttcccagtttctgtaaaaaaaaa

SEQ ID NO: 217 - DNA, 1479 bp, Hordeum vulgare
tgccgaattcggcacgagaaagaggtccgaggggcttaagaacttctcgtacgatgagatttccactgcttgccagtggttttctggcgatcatcgtgtctcagaaactctgacttcgacatcatacaaggcattgttcagggatgatttcgttgaaccaaagaagatggaagcaatagtagccaggttactcccttccaatcagagtttcaaagaatttaaggcacaagtaaatacgttggcatcacttcaacatcccaatttatgtaaactcatcggctatcacgcaagagaagaatctaatgaaaggatgttggtctatgagcggctccatcatggcagtttagacaggttactctttggaagaccggaaggtcgtttcatggactggtctacacgtttgaaggttgcccttggtgctgctaaaggtctagctttcctacacgatgaaggaccctttcaggcaatgtatgatgacttctcaacgtcaaacatccaaatagagaaagatttcactgcaaagctgtcgggatatggttgtgttggcttcaattctgacgaggaaagatccaaggcatctgtggctgcaaacctctcagaggaaaccttggagaaaggcgtactgactccgaagagcaacgtatggagctttggagttgtcttgctcgagctaataacaggacggaagaacctcgatgtacgttccaccaaagaagaacgtaatattgtcaagtggggtaggcctttcctcaccgacgatagtcgtctatccctcatcatggatccccgtataaaaggacgctttcctaccaaggctgctcgaactgtggcagacataattctgaagtgccttcaaagagatccatcagaaaggcctacgatgagggccgtcgtggaggccctaacaagcgttcaggacataaaggtcccctgccggtatcctcttcaagtaccgtcccgccgcacccgaggaaagtgatgctaaagtctacgagcctcaatggcattgttcctcagcatcccgtcatgaccttctcgccgtcgcctccttcgcgcaaccagcacctggcgtcgccaagatcatcgacttccgcgcttcttcccccaaggacctgctcttccatcatcaccctggattaccccagggtaagctcggtcaagaagtcgccttccggtatcctgcggagacctggcgtcgagggtttttgattgtccatacatggtcggatttcttctctttgccttggatttatttgttgttttggttagcctagcgagtggtctcagtgctatgtgatatgtatatgttggaaagacatctgaaaaaagggcagagtgaagtgtagatagtagaaccagctttgtagatacttgtcgttctctgattggatgggggtcatggaagcagtgtgtgttagagtggggcttgtaaccccattattatgcaataaacgtgggttggtcggtcgtatttgctcg

SEQ ID NO: 218 - DNA, 769 bp, Glycine max
gtaaattgctaggatttcatgcacgagagggttcagaacatagaatgttggtttatgaaaggctataccatggaagcttggatcgcttattgtatgggagatctgatgggccatcaattgattggaatacaagaatgaaaattgctatatgtgctgcacaaggtctaaccttcttgcacgaagaggggccttttcaggctatgtataatgagttctcaacagccaacatacagattgacaaagatttcagcgcaaagctttcaggatatggttgtgttggacatattcccgaagaagagatttcaagcagctcatctgctgttggaaacctatcaatggaaacactggagaaaggaatgctcactccaaagagcaacgtatggagttttggaatttttcttctggagctacttactggaagaaagaatcttgatagccgtcaccccaaggaagagaggaatttagtcaagtggagccggcctttcttagccgataactaccgtctgtcgttgatcatggatcctcaactcaaaggccgctttccttctaaagcagcaagaacaatagctgatattgcacaaagatgccttcaaaaggagccatcagacagacctaccatgaggactgttgttgagcatctcaagataatacaggatttgaaatattcgtgccggttccctctgcaagaaccagcatcaaactctggaaaacatatgtcaagatcaccaagtctcaatggcatcatctgccctgcaccaagggtgagttt

SEQ ID NO: 219 - DNA, 1150 bp, Solanum tuberosum
ttcttagctcatcgaaacgttaaaccttacaatacttcaaacatcgatcaatacaatttgctgaagcacgcaatttttcaaggactgtataaacaacaaagatgggttgtttcacagttttaaaaagtaagaagaagaagtctgaacagagtattcacatcaaacgtgtgaatcctcaggaacattctcctactgcattgcccgagcctcaagtgcagacacggtcgttgcagtcggcacctccaagttttagaactagagtaaaacctgtacagtcgagtaatagagttacaagcagtagggcgcgggcactctctgccccatctagcctggactcagcagaacaagatgtagcatcaaatgaatgtgaggaacatgatgagttcaagagtcgtattggttcaatcaaggagtaccaatcaccaagtcctcagcctcttcctcttccatctccacagagtgccgctgccactctcaagactatgggaagctttaaagttggcaacgccagcggtccgttaaatgcctctggacccctgccactgcctcctacactgccttcaacattgccttctactggagcactcaggaacttctcatttgaagaacttgctgctgcctgccaccgcttctctcctgaacggtgtatgtcagaaggtctctcttctgttatttacagagcttcttttggagatgatgcaactggtacaaagaagcttgaagccactgtaacccggcttcatccttcttcgcaggggttgaaggaatttgtgactgaggtgaacacactagcttctttgcaacatccatcactttgtaaactgattggtttccatgccacggggaaggttccgagcacagaatgttggtttatgaaaggctttttcatggaagcttagaccggcttttgtttgggaggtccgatggtcccccgatagactggaatgctcgaacgaaaattgctttatgtgctgctcaaggtctcacattcctgcatgaggaaggaccttttcaggcaatgttccatgaattttccactgcaaatatacaaattgataaggattgcagtgcaaagctctcgggatatggatgcattactcctataccagagacagacatatcatgcagttcagctgccctggcaatctct

SEQ ID NO: 220 - DNA, 910 bp, Lycopersicon esculentum
catggaagcttacaccggcttttatttgggaggtcggatggtcccccaatagactggaatgctcgaataaaaattgctttatgtgctgctcaaggtctcacattcctgcatgaggaaggaccttttcaggcaatgttccatgaattttccactgcaaatatacaaattgataaggattgcagtgcaaagctctcgggatatggatgcattactcatatacaagagacagacatatcatgcagttcagctgccctggcaaatctctctgaggagactctggagcgaggattggtaactccaaagagtaatgtttggagttttgggattgttcttcttgagctgctgactggccggaagaatttaagcagtcggcatccaaaggaagagaggaatttagtgaagtggagcaagctttttctagctgatgacagtagattatcgctaatcatggaccctcagttaaaaggtcggttccctgccaaagcagcaagaactgtggctgatattgctcaaagatgtctgcaaaaggatccatctgaaaggcccaccatgagaactgtagtggagcaactcaagactgtacaagttatgaagtacccttctcggtttcctcttcaagagccaagggcagttggtgtaaaacacatgtcaaagtgtccgagcctaaatggaattattaccccaacatcaagattgagcttctccccttcaccaccaacccaccctatatctatttctccgacaaggacagctgctccactgctgtctctaccttcatgttcctccatcctctctatggaggactttgatcgattggaaaatcgaaggccatcatcttcatctgttcggaggtctagtgtcgaaggattttgatcgattgtagagcacttttttcttcaaattgcttttc

SEQ ID NO: 221 - DNA, 681 bp, Lycopersicon esculentum
gagaggctttttcatggaagcttagacagacttttgttcggaagatcagatggcccctctatagattggaatgcgagaaccaaaattgccctatgtgctgcacaaggtcttacatttctacatgaggagggaccttttcaggcaatgttccaagaattttcaactggaaatatacaaatcgacaaggattttagtgcaaagctctcggggtatggatgcattacgaatatacaagagacggagatatcttgcaattcaatcgccctggcgaatctctcacaggagacactggagagagggttgataactcctaagagcaatgtttggagtttcgggattgttcttttagaactgctcactggccggaagaatcttgatggtcggtattcaaaggaagagaggaatctagtcaagtggagtaggcctttccttgctgatgatggtagattatcgcttatcatggatcctcagcttaaaggacggtttcccgcaaaagcagcccgtacagtggctgatattgcccaaagatgcctgcaaaaggatccatctgaaaggcccaccatgagaactatcttggaccaactcaaatccgtacaagtgatgaagtgcccttcacggtttcctctgcaagaaccagcggttgttggtggtaaacacatgtcaaagtctccaagcatgaat

SEQ ID NO: 222 - DNA, 741 bp, Triticum aestivum
tttcctcccaaggctgctaggactgtggcagacatcattctgaagtgccttcatagggatccatccgaaaggcctacgatgagggccgtcgtggagtctctagcaagcgtccaggacataaaggtcccctgccggtatcctcttcaagtaccgtccgccgcaccgaggaaagtgatgctaaaatccacgagtctcaacggcattgttcctcagcatcctgtcatgaccttctcgccgtcgcctccttcgcgcaaccagcacctggtgtcaccgagatcatcgacgtctgcgctgcttcccccaaggaactgctcttccaccatcaccctggactaccccagggtaagctcggtcaagaaatcgccccccaacatcatgcggagacctggcgtcgagggtttttgattgtccatatagtgtcggattttcttctctttgccttgatttatttgttgttttggttagcctagcgagtgatctcagtgctatgggatatactatgttgcaaggacatgtgaaaaagggcagagtgaagcgtagatagtagaaccagcttgtagatacttgtcgttctctgattggatgggggtcatggaagaagtgtgtgttgagtggggcttgtaaccccactatgcaataaacgtgggttggttggtcggtcggtatttgctcgccgtcaaacatttcagctgtttctttcttctcttgaatgctaagttttgttgctgctagtcgtggaat

SEQ ID NO: 223 - DNA, 2039 bp, Zea mays; identical to SEQ ID NO: 216

SEQ ID NO: 224 - DNA, 768 bp, Lactuca sativa
accgactgatggccgctagtcggggaagaacacgaagaatccaaaacccgtggcagcggcggaggcggaggcgggttgccgcctgtcccgcagccgctgccgcttcctgcaccgcattcacgccaacttcgaaaaccatcgcggaatgcttttaaagattgagtggcggtgagttgggcatgctgccagcctcttaatacttccggaccctctgccacttccgccatcgggaaccacccatcttccgccaatgattccggcatctttaccgacatctggaacacttaagaacttcacatattgaagaaatcgcagctgcttgccacaacattttcaccctgacagatgcgtgtctgaaggtctttcttctgttatgtatagagcttcttttggagaagatacttctaatttaaagaatcttcaagccactgttaccagtctccatccttcaactcagggtttgaaggaatttgtgagtgaagtgaacacgctagcatcattgcaacacccttatctctgtaaatagattggtttccatgcgcgtgagggatctgatagaagaatgttggtttacgagaggctttttcatggaagcttagatcggcttttatatggtacaacagatggcccacctattgattgcaatgcaagaatgaaagtcgcactctgtgctgctcaagggcttacttttttgcatgaggaaggaccatttcaggcgatgtttcatgaattttccactgctaatatacaaattgataaagattttag

SEQ ID NO: 225 - DNA, 1637 bp, Gossypium spp.
ctttttcctctcaaacctctctcacactgataaacttttctctccattacctttctttgacttgcaaagttgttctcctcaaactaaccaaacaagggattctgggttttcagctttctctgttttcctactctctttcgcctttgcatgacctgcttacatagaaacataaaagtccgaaatacaatttaggtggtttgtatataagatggggtgttttacagttttgagaagcaacaagaaaaagtccaaacagtcagtttttgttaaacacattgctcataaagagcatattcctaccatgctgcctgagccccaaattcagacacgatcactgcaatctgcacccccaagttttataaccagagtaaaaccaattcaatctaataacaaggcaagctgcaataggacacgtgcattatctgctccgtcaagtcttgatgctgctgagcaagatgaccttgcgtcagttgaatttgaagaacaagaagagttgaagagtcgtgttggtttagtcaaggaacagaagtcatcaagtccacagcctcttccacttccatctccccacagtactgcgctgaagacaatgggaagttttaaagcagggaatgttagtggccctctttttgcttcgggaccattacccctgcctccctctggaacactacgtaacttcgcctacgaagaaattgcagctgcttgccatcatttctcttctgatcgatgcacatctgagggtctatcttctgttatgtacaaggcatccttcggagatgacacatcaagttcaaagaagtttgaagctactgttactcgccttcacccatccactcagggtttaagggaatttataaacgaagtaaacactcttgcatcattgcaacatccaaatctctgtaaattgcttgggtaccatgcacgtgataattcagaacaacgaatgttggtctatgagaggttatttcatggaagcttagaccggcttttatacgggagatcggatggaccgccacttgattggaatactcgcatgaaaattgctttatgttctgcacagggtcttactttcttgcatgaggaaggaccatttcaggcaatgtacaatgaattttcgactgccaacatacagatcgacaaggatttcagtgcaaagctctcaggatatgggtgcgttggtcatatcccagagacagaagagatctccagtaattcagttgctgtggcaaatatatccgtagagactctggagagagggcgactaactccaaagagcaatgtttggagttttgggatcattctacttgaattactcactggccggaagaaccttgacaaccgttatcccaaggaagagaggaacctagtgaagtggagccggccattcctagccgacaattgtagattgtcactcatcatggatcctcagctcaaaggtcgctttcctatgaaagctgcccgtacggtggctgacattgcacaaaggtgtctccagatggacccatcagagaggccaaccatgagaaccatcgttgagcatctcaaaatcatccaagacctgaaatactcttgtcggtttcctctgcaagatccagcagcaattgctggaaaacagatgtcaaggtcaccgagtctcaacg

SEQ ID NO: 226 - DNA, 2193 bp, Oryza sativa; identical to SEQ ID NO: 54

SEQ ID NO: 227 - DNA, 56 bp, Artificial sequence
  primer: prm06729
ggggacaagtttgtacaaaaaagcaggcttaaacaatgatgggttgcttcactgtc

SEQ ID NO: 228 - DNA, 50 bp, Artificial sequence
  primer: prm06730
ggggaccactttgtacaagaaagctgggtatggacaatcaaaaaccctca

SEQ ID NO: 229 - DNA, 1176 bp, Arabidopsis thaliana
cttcaactgctgcgtctagctgtccttccttcttcatttgcttcttcttctctagctcagcgcggatcgctgcagtagtaccctgacgtagcctttcttcttcctttactttctcatcttctatctctcaaaagaaaagcagacaactttatttgcaaaaacagagtttttttttcttatcttgagaaagttcaacagaagatgatgttcgagaaagacgatctgggtctaagcttaggcttgaattttccaaagaaacagatcaatctcaaatcaaatccatctgtttctgttactccttcttcttcttcttttggattattcagaagatcttcatggaacgagagttttacttcttcagttccaaactcagattcgtcacaaaaagaaacaagaactttcatccgaggaatcgacgtgaacagaccaccgtctacagcggaatacggcgacgaagacgctggagtatcttcacctaacagtacagtctcaagctctacagggaaaagaagcgagagagaagaagacacagatccacaaggctcaagaggaatcagtgacgatgaagatggtgataactccaggaaaaagcttagactttccaaagatcaatctgctattcttgaagagaccttcaaagatcacagtactctcaatccgaagcagaagcaagcattggctaaacaattagggttacgagcaagacaagtggaagtttggtttcagaacagacgagcaagaacaaagctgaagcaaacggaggtagactgcgagttcttacggagatgctgcgagaatctaacggaagagaaccgtcggctacaaaaagaagtaacggaattgagagtacttaagctctctcctcagttctacatgcacatgagcccacccactactttgaccatgtgcccttcatgtgaacacgtgtcggtcccgccaccacaacctcaggctgctacgtcagcgcaccaccggtcgttgccggtcaatgcgtgggctcctgctacgaggatatctcacggcttgacttttgacgctcttcgtcctaggtcctaagtctttttacttgcaaccaaagggcattttggtcgttttttaagtttcatggaccagatatgcatgtagttgttaacatgtatgtattttcttagaaagaaagaaaaacagattaatatt

SEQ ID NO: 230 - protein, 284 aa, Arabidopsis thaliana
MMFEKDDLGLSLGLNFPKKQINLKSNPSVSVTPSSSSFGLFRRSSWNESFTSSVPNSDSSQKETRTFIRGIDVNRPPSTAEYGDEDAGVSSPNSTVSSSTGKRSEREEDTDPQGSRGISDDEDGDNSRKKLRLSKDQSAILEETFKDHSTLNPKQKQALAKQLGLRARQVEVWFQNRRARTKLKQTEVDCEFLRRCCENLTEENRRLQKEVTELRALKLSPQFYMHMSPPTTLTMCPSCEHVSVPPPQPQAATSAHHRSLPVNAWAPATRISHGLTFDALRPRS

SEQ ID NO: 231 - DNA, 3171 bp, Arabidopsis thaliana
gacaatccgaaattaggtaaccatgttcattgaatttatcgtttcaacacattcgaatcactgagtcctacgtttcagtttaattccctgatgcacattttgaattcggtttgcgtattggtcttcgagttttccgtcggcggccatggacgcgttcaaggaggagatagaaatcgggagctcggtggagtctttaatggagctattggattcgcagaaggtgctttttcatagccagatcgatcagctccaagatgtcgtcgttgcgcaatgcaaacttaccggcgttaatccccttgcgcaagaaatggctgctggtgctttgtccattaaaattggaaagcggccaagagacttgttgaatcctaaggctgttaagtatctacaagcagttttcgcaattaaagatgctattagtaagagggaatctcgggagataagtgctttatttggcatcacagtcgcccaggttcgagaattttttgttactcaaaagacaagagtgaggaaacaggtgaggctttcaagggagaaagtagttatgtccaatacgcatgctttacaagatgatggtgttccggaaaataacaatgccacaaatcatgttgaacccgttcccttgaactctatacatccggaggcatgttctataagctggggtgaaggtgaaacagtggcacttattccacctgaagatattccacctgacatcagcgattcagacaaatactttgttgagaatatattttctctgctgcgtaaagaggaaacattttcaggccaggtgaaactaatggagtggatcatgcagatacaagatgcttctgtgctgatctggtttttatcaaaaggaggggttttgatacttacaacatggttaagtcaagctgctagtgaagagcaaacaagtgtcttacttcttatcctgaaggttctttgtcatttacctctccacaaagcatctcctgaaaatatgtctgccatattacaaagcgttaatggacttcgtttctataggatatcagacatatcaaacagggcaaaaggtttgttatcaaggtggaccaagttatttgcgaaaatccaagctatgaagaaacaaaatcgtaacagttcgcaaattgattcgcagagtcaattgcttctgaaacagagtattgctgaaatcatgggtgatagtagcaatcctgaagatattcttagtctctcaaatggaaagtcagagaatgtcaggaggattgaatcgtcacagggtccaaaactgttgcttacttctgcagatgattccaccaagaaacacatgcttggttcaaatccatcgtataacaaagaacgcaggaaagtacagatggtggaacaaccaggccaaaaagctgctggaaagagtccgcagacagtaagaataggaacttcaggtcgaagccgcccaatgtctgctgatgatattcagaaagcaaagatgcgtgccctttatatgcagagcaagaacagtaaaaaggatcctttaccaagtgccattggtgattcgaaaatcgttgctcctgagaagcccttggctcttcattcagccaaggattctccacctattcagaacaatgaagctaagactgaagacacacctgtactctcgactgttcagcccgtcaatggattttcaactattcagcccgtcaatggaccttcagctgttcagcccgtcaatggacctttggctgttcagcctgtcaatggaccttcggctcttcagcccgtcaatggaccttcggccgtaattgtcccggtacaagctgatgaaattaaaaaaccttcaacacctcctaaaagcatttctagtaaggtgggagttatgatgaaaatgagttcacaaactattctcaagaattgcaagagaaaacagattgattggcatgtaccaccaggaatggaacttgacgaactctggagagtagccgctggtggtaatagcaaggaggctgatgttcagagaaacagaaaccggcgagaaagagaaacaacatatcagtctcttcaaactataccgttgaaccctaaagaaccatgggatagggaaatggactatgatgacagtttgacccctgaaattccatctcaacagccaccagaagaaagtttaacggaaccacaggattcacttgatgaacgaagaattgctgctggtgctgccacaacctcttcatctctaagcagtcctgaacctgatctcgagttattagctgcgttacttaagaacccagatcttgtttatgcactaacttcgggaaaacccagtaatttagccggccaagatatggtaaaactgcttgatgtgattaagactggtgcaccaaactcaagcagtagctcaaataaacaggttgaagaaagggtcgaagtttcccttccatctcccactccatcaactaatcctggaatgagtggatggggacaagaagggattcggaatccattttcaaggcaaaaccaagttggtactgcagttgctagatcgggtacacagcttcgtgttggttcaatgcaatggcatcaaacaaatgaacaatcaatcccacgacatgctccatcagcatacagtaactcgatcacattggctcacacagaaagagaacagcaacaatatatgcaaccaaaacttcatcacaatttacattttcaacaacaacaacaacaaccaatctcaacaacctcgtatgcagttagggaaccagtaggacaaatgggaacaggtacatcgagttcatggaggagtcagcagagtcagaacagttactactcacatcaagaaaacgagattgcatcggcttcacaagttacttcataccaagggaatagccagtacatgagtagcaatccaggatatgaatcatggagtcctgataatagcccaagtaggaaccagcttaacatgaggggacaacaacaacaagcatcaaggaaacatgattcttctactcatccatattggaaccaaaacaaaagatggcgttaaaccatatataagactatggttctttggtcctcaatatttgcttgtcatggttgaattagcattatactctgttcagacacagattttcatttttaactcacaacagattcatcagagataataaactaaaagaaagaatgaatggataaagttattactgtctc

SEQ ID NO: 232 - protein, 953 aa, Arabidopsis thaliana
MDAFKEEIEIGSSVESLMELLDSQKVLFHSQIDQLQDVVVAQCKLTGVNPLAQEMAAGALSIKIGKRPRDLLNPKAVKYLQAVFAIKDAISKRESREISALFGITVAQVREFFVTQKTRVRKQVRLSREKVVMSNTHALQDDGVPENNNATNHVEPVPLNSIHPEACSISWGEGETVALIPPEDIPPDISDSDKYFVENIFSLLRKEETFSGQVKLMEWIMQIQDASVLIWFLSKGGVLILTTWLSQAASEEQTSVLLLILKVLCHLPLHKASPENMSAILQSVNGLRFYRISDISNRAKGLLSRWTKLFAKIQAMKKQNRNSSQIDSQSQLLLKQSIAEIMGDSSNPEDILSLSNGKSENVRRIESSQGPKLLLTSADDSTKKHMLGSNPSYNKERRKVQMVEQPGQKAAGKSPQTVRIGTSGRSRPMSADDIQKAKMRALYMQSKNSKKDPLPSAIGDSKIVAPEKPLALHSAKDSPPIQNNEAKTEDTPVLSTVQPVNGFSTIQPVNGPSAVQPVNGPLAVQPVNGPSALQPVNGPSAVIVPVQADEIKKPSTPPKSISSKVGVMMKMSSQTILKNCKRKQIDWHVPPGMELDELWRVAAGGNSKEADVQRNRNRRERETTYQSLQTIPLNPKEPWDREMDYDDSLTPEIPSQQPPEESLTEPQDSLDERRIAAGAATTSSSLSSPEPDLELLAALLKNPDLVYALTSGKPSNLAGQDMVKLLDVIKTGAPNSSSSSNKQVEERVEVSLPSPTPSTNPGMSGWGQEGIRNPFSRQNQVGTAVARSGTQLRVGSMQWHQTNEQSIPRHAPSAYSNSITLAHTEREQQQYMQPKLHHNLHFQQQQQQPISTTSYAVREPVGQMGTGTSSSWRSQQSQNSYYSHQENEIASASQVTSYQGNSQYMSSNPGYESWSPDNSPSRNQLNMRGQQQQASRKHDSSTHPYWNQNKRWR

SEQ ID NO: 233 - DNA, 501 bp, Oryza sativa
atggagcagcagcttcctcttcttgcacctgactctaaggctgccacgtcgtcccccttgtgcctcaccttggacaacccaacctccacatccacctcgccggcggtgccgtcgtcggcgccgccgccggcagccgccttggaaccttctagacaatctttccatgagagggaaacggatgcaatcaaagccaagatcatgtcgcaccccctctacccggctctcctcagagccttcatagattgccagaaggtcggagctccgccggaggtcgtcggccggctttccgccctcgccggcgagctcgactcgcgtgcagaagacaggtaccttcaagggcagtcgtcagacccggagctcgacgagtttatggaaacctacattgatatgctggtgagctacaggcaggagctgacaagaccaattcaagaggccgaccagttcttcagaaacatggaggcacagatcgactcgtttacactagagatgtgcagtttctga

SEQ ID NO: 234 - protein, 166 aa, Oryza sativa
MEQQLPLLAPDSKAATSSPLCLTLDNPTSTSTSPAVPSSAPPPAAALEPSRQSFHERETDAIKAKIMSHPLYPALLRAFIDCQKVGAPPEVVGRLSALAGELDSRAEDRYLQGQSSDPELDEFMETYIDMLVSYRQELTRPIQEADQFFRNMEAQIDSFTLEMCSF

SEQ ID NO: 235 - DNA, 879 bp, Oryza sativa
atggctcaggaggacgtcggtcacctgagcgacgccggcctggcgctgggcctgtccctcggcgggggaggaggagggacgaccgacgcggcggcggcgcaccgtggcggctgccggcggccgtcgccgtcgtcgcagtgcccgccgctggagccgtcgctgaccctgagcttgcccgacgacgcggcggccggcgcggccgcgaccgcgaccgcgaccgcgtccggcgggggcggccctgcgcacagcgtgtcgtcgctgtccgtcggcgcggcggcggcggcggccgtgaagagggagcgcgcggaggaggccgacggcgagagggtgtcgtcgacggcggccgggcgtgacgacgacgacgacgggagcacccgcaagaagctccggctgaccaaggagcagtccgcgctcctggaggaccgcttccgggagcacagcacgctcaacccgaagcagaaagtcgctttagcgaagcaactgaacctcaggccaaggcaggtggaggtctggttccaaaacagaagagcaaggacaaagctgaagcagacggaggtggactgcgagttcctgaagcgctgctgcgagacgctcaccgaggagaaccgtcggctgcagcgcgagctgcaggagctccgcgcgctcaagttcgccccgccgccgccgtcctcggcggcccaccagccgtcgccggcgccaccggcgccgttctacatgcaactcccggccgccacgctcaccatctgcccgtcctgcgagcgcgtcggcgggcccgcgtccgccgccaaggtcgtcgccgccgacgggaccaaggccggccccggccggaccaccacccaccacttcttcaaccccttcacccactccgccgcctgctga

SEQ ID NO: 236 - protein, 292 aa, Oryza sativa
MAQEDVGHLSDAGLALGLSLGGGGGGTTDAAAAHRGGCRRPSPSSQCPPLEPSLTLSLPDDAAAGAAATATATASGGGGPAHSVSSLSVGAAAAAAVKRERAEEADGERVSSTAAGRDDDDDGSTRKKLRLTKEQSALLEDRFREHSTLNPKQKVALAKQLNLRPRQVEVWFQNRRARTKLKQTEVDCEFLKRCCETLTEENRRLQRELQELRALKFAPPPPSSAAHQPSPAPPAPFYMQLPAATLTICPSCERVGGPASAAKVVAADGTKAGPGRTTTHHFFNPFTHSAAC

SEQ ID NO: 237 - DNA, 744 bp, Oryza sativa
atggcgcaagatgatgaggacgtgggtctagctctgggcctctccctgggctccggcggccacaggcggcagagagaaagtagagacgaagcgccgtcgtcggcggcggcgtccctgctgacgctgaggctcccggcagagagcggggggcagccgcaggtggtggtgaagagggaggtggtgcgggcggaagaggaggagtacgaatacgagtacgagagggcgctctactcgtcgtcggctgcggcggcggacgacgacgagggctgcaacagccggaagaagctgaggctgagcaaggagcagtcggctctgctggaggatcgcttcaaggagcatagcactctcaaccctaagcaaaaggttgctttggcgaagcagctaaacctgaggccaaggcaagttgaggtgtggttccaaaacagaagagccaggacgaagctgaagcagacggaggtggattgcgagcttctgaagcgctgctgcgagacgctgacggaggagaaccgacgcctccatcgtgagctccagcagctcagggctctgacccactccaccgccgccggcttcttcatggccaccaccctccccgtccccgccgccacgctctccatctgcccctcctgcgagcgcctcgccaccgccgccgccgccggagcttcccccaccgccgccgccgaccgcaccaacaagcccaccgccccgcacttgttcagccctttcgccaagtccgccgcctgctag

SEQ ID NO: 238 - protein, 247 aa, Oryza sativa
MAQDDEDVGLALGLSLGSGGHRRQRESRDEAPSSAAASLLTLRLPAESGGQPQVVVKREVVRAEEEEYEYEYERALYSSSAAAADDDEGCNSRKKLRLSKEQSALLEDRFKEHSTLNPKQKVALAKQLNLRPRQVEVWFQNRRARTKLKQTEVDCELLKRCCETLTEENRRLHRELQQLRALTHSTAAGFFMATTLPVPAATLSICPSCERLATAAAAGASPTAAADRTNKPTAPHLFSPFAKSAAC

SEQ ID NO: 239 - DNA, 1065 bp, Oryza sativa
atggagctggggctgagcttgggggatgcggtgaccgtggcggatggcgggaggctggagctggttcttgggctcggggttggggttggggctggggtgaggagaggagaggaggaggagagggggaggagggaggatgtggtgggagctgggaggtgggcggcgatggcggcggcctcgccggagccgtcggtgcggctcagcctcgtgtcgagcctcgggctccactggccttccgagaccgggcgttcggaggcggcggcgcgtgggttcgacgtgaaccgggcgccgtcggtggcggcgggcgcgccggggatggaggacgacgaggagggcccgggcgccgcgccggcgttgtcgtcgtcgcccaacgacagcgggggatccttcccgctggacctctccgggcaaggcctccgtggccacgccgaggcggcggcgcagggtggcggcggcggcggcggcggcgagcggtcgtcctcgcgcgcgagcgacgacgacgagggcgcgtccgcgcgcaagaagctgcgactctccaaggagcagtcggcgttcctcgaggagagcttcaaggagcacagcacgctgaatcccaagcagaaggtggcgctggcgaagcagctcaacctccggccgcggcaagtggaggtctggttccagaaccgccgagccaggacgaagctgaagcagacggaggtggactgcgagtacctgaagcgctgctgcgagacgctcaccgaggagaaccggcggctgcacaaggagctcgccgagctgcgcgcgctcaagacggcgcgccccttctacatgcacctcccggccacgaccctctccatgtgcccctcctgcgagcgtgtcgcctccaacccggccaccgcttcgacctccgcccccgccgcggccacgtccccggcggcggcgccgaccgcggccgcaagaaccgccgtcgcgtcgcccgagccgcaccggccgtcgtccttcgccgcgctgttcgcggcacccctcggcttcccgctgaccgccgcccagccgcggccgccgccgccggcgagcaactgcctgtaa

SEQ ID NO: 240 - protein, 354 aa, Oryza sativa
MELGLSLGDAVTVADGGRLELVLGLGVGVGAGVRRGEEEERGRREDVVGAGRWAAMAAASPEPSVRLSLVSSLGLHWPSETGRSEAAARGFDVNRAPSVAAGAPGMEDDEEGPGAAPALSSSPNDSGGSFPLDLSGQGLRGHAEAAAQGGGGGGGGERSSSRASDDDEGASARKKLRLSKEQSAFLEESFKEHSTLNPKQKVALAKQLNLRPRQVEVWFQNRRARTKLKQTEVDCEYLKRCCETLTEENRRLHKELAELRALKTARPFYMHLPATTLSMCPSCERVASNPATASTSAPAAATSPAAAPTAAARTAVASPEPHRPSSFAALFAAPLGFPLTAAQPRPPPPASNCL

SEQ ID NO: 241 - DNA, 1089 bp, Oryza sativa
atggagctggggttgagcttgggggaggctatggcggatgctgggagggagctggttcttgggcttgggatggggaggagggaggaggcggcggaggcggggaggagggatcatgaggtgaggagggagctggagttcgggtcgatgtcgagcaggtgcggtggttcttcgccggagccgacggtgcggctcacgcttctgcccatggtgcccggccttggcctcccatggccgccgccgccgccgccgtcgtccgagagcaggcatttggaggcgtcgacgcggggattcgacgtgaaccgcccgccgtcgtccggcggcggcggcggcggcggcggcgcggaggaggagcaggacgacgtggccggggcggcactctcgtcgtcccccaacaacagcgccggatccttcccgatggatgacttctccgggcacggcctcggcggcaacgacgcggcccctggcggtggcggcggcgaccgctcgtgctcccgcgccagcgacgaggacgacggcggctccgcgcgcaagaagctccgcctctccaaggagcagtccgcgttcctcgaggagagcttcaaggagcacagcaccctaaaccccaagcagaagctggcgctggcgaagcagctcaacctccggccgcgccaggtggaggtgtggttccagaaccgccgcgccaggacgaagctgaagcagacggaggtggactgcgagtacctgaagcggtgctgcgagacgctgacggaggagaaccggcggctgcagaaggagctcgccgagctccgggcgctcaagacggtgcaccccttctacatgcacctcccggcgacgacactctccatgtgcccctcctgcgagcgcgtcgcctccaactccgccccggccaccgcctcctccgccgcaacatcgtcgacggccgcgccgcccgcggcaccctcatccggcggcattgcggccacctcctcctccgccgccgccgccgcggcgccggaccacaggccgtcgtcgttcgccgcgctgttctcgtcgccgcgtggcttcccgctatccgtagccccgcaggcgcagccgccgacgagctcgtga

SEQ ID NO: 242 - protein, 362 aa, Oryza sativa
MELGLSLGEAMADAGRELVLGLGMGRREEAAEAGRRDHEVRRELEFGSMSSRCGGSSPEPTVRLTLLPMVPGLGLPWPPPPPPSSESRHLEASTRGFDVNRPPSSGGGGGGGGAEEEQDDVAGAALSSSPNNSAGSFPMDDFSGHGLGGNDAAPGGGGGDRSCSRASDEDDGGSARKKLRLSKEQSAFLEESFKEHSTLNPKQKLALAKQLNLRPRQVEVWFQNRRARTKLKQTEVDCEYLKRCCETLTEENRRLQKELAELRALKTVHPFYMHLPATTLSMCPSCERVASNSAPATASSAATSSTAAPPAAPSSGGIAATSSSAAAAAAPDHRPSSFAALFSSPRGFPLSVAPQAQPPTSS

SEQ ID NO: 243 - DNA, 771 bp, Oryza sativa
atggagaggcaaggcttggatcttggcctgagcctcgggctaggcttgacgacggcggcgacatggccggctgctgggttctgtctgaactccggcatggcggagcaggaagtgatcaggcgtgatgatgtggttgcggcgacggcggcggaggatgagaggttcgcgtgctcacccggcagcccggtgtcgagcggcagcgggaagcgaggcagcggcagcggcagcggcgacgaggtcgacgacgccggctgcgacgtcggcggcggcggcgcgcgcaagaagctgcggttgtccaaggaccaggccgccgtcctcgaggagtgcttcaagacgcaccacaccctcactccgaagcagaaggtggcgctggcgaagagcttgaacctgcggccgcggcaggtggaggtgtggttccagaaccgccgcgcgaggacgaagctgaagcagacggaggtggactgcgagcacctcaagcggtggtgcgaccagctcgccgacgacaaccgccgcctccacaaggagctcgccgagctcagggcgctcaaggccacgcccacaccgcccgccgccgcgccgccattgaccaccctcacaatgtgcctctcctgcaagcgcgtcgccaatgccggcgtgccctcgccggcggcggcgatattccccggccacccccagttcttgtgcggattcagagatcacgccggagcagcgtcgtcgtcgtacggcggcgcatcatctggactcgcgaaggcggtcagggcggcgaggtag

SEQ ID NO: 244 - protein, 256 aa, Oryza sativa
MERQGLDLGLSLGLGLTTAATWPAAGFCLNSGMAEQEVIRRDDVVAATAAEDERFACSPGSPVSSGSGKRGSGSGSGDEVDDAGCDVGGGGARKKLRLSKDQAAVLEECFKTHHTLTPKQKVALAKSLNLRPRQVEVWFQNRRARTKLKQTEVDCEHLKRWCDQLADDNRRLHKELAELRALKATPTPPAAAPPLTTLTMCLSCKRVANAGVPSPAAAIFPGHPQFLCGFRDHAGAASSSYGGASSGLAKAVRAAR

SEQ ID NO: 245 - DNA, 927 bp, Oryza sativa
atgatggatctcggcctcagcctcggcctcggcctcgcctcgcagggcagcctcacctcctccaccaccaccacctcctcccccggcgccggatcatcctccccgtgggccgccgcgctcaactccatcgtcggcgacgtgaggcgggatcaggccgcggcgcatgctgccgcggcggtgggggttggggttgggggcgaggagatgtaccaggggagggcgtccacgtcgccggacagcgcggcggcgctgtcgagcgcgagcgggaagagggagagggagctggagcggtcgggatccggggttgacgacgacgacggcgcggacggcgccggcgggcggaagaagctcaggctgtccaaggaccaggccgccgtgctcgaggagtgcttcaagacgcactccactctcaaccccaagcagaaggtggcgctggcgaacaggctggggctgcggccgcggcaggtggaggtgtggttccagaaccggagggcgaggacgaagctgaagcagacggaggtggactgcgagtacctgaagcggtggtgcgagcgcctcgccgacgagaacaagcgcctcgagaaggagctcgccgacctcagggcgctcaaggccgcgccctcgccggcgtccgcgtccgcgatgcagccctcctcctccgccgccgccacgctcaccatgtgcccctcctgccgccgcgtcgccaccgccggcgcgccgcaccagcctaaccaccaacaatgccatcccaaatctaacaccaccatctcctcctcctccaccgccgccgccgccgtcgccgtcgccggcggcaacgtgctgcccagccactgccagttcttcccggccgccgccgccgccgccgaccggacaagccagagcacgtggaacgccgccgcgccgctcgtcaccagagagctcttctag

SEQ ID NO: 246 - protein, 308 aa, Oryza sativa
MMDLGLSLGLGLASQGSLTSSTTTTSSPGAGSSSPWAAALNSIVGDVRRDQAAAHAAAAVGVGVGGEEMYQGRASTSPDSAAALSSASGKRERELERSGSGVDDDDGADGAGGRKKLRLSKDQAAVLEECFKTHSTLNPKQKVALANRLGLRPRQVEVWFQNRRARTKLKQTEVDCEYLKRWCERLADENKRLEKELADLRALKAAPSPASASAMQPSSSAAATLTMCPSCRRVATAGAPHQPNHQQCHPKSNTTISSSSTAAAAVAVAGGNVLPSHCQFFPAAAAAADRTSQSTWNAAAPLVTRELF

SEQ ID NO: 247 - DNA, 936 bp, Oryza sativa
atggagatgatggttcatgggaggagagacgagcagtatggcgggctcaggctcgggcttgggcttgggctcagcctcggcgtcgccggtggtgcagccgacgacgagcagccgccgccgcgccgtggtgccgccccgccgccgcagcagcagctgtgcggctggaacggcggcggtctcttctcctcgtcttcctccgatcatcgggggaggtcggcgatgatggcgtgccacgacgtcatcgagatgccgttcctgcgggggatcgacgtgaaccgtgcgccggcggcagagacgaccacgacgacggcgagggggcccagctgcagcgaggaagacgaggagcccggcgcgtcctcccccaacagcacgctctccagcctcagcggcaagcgcggcgcaccatctgccgccaccgccgccgccgccgccgccagcgacgacgaggactccggcggcggatcccgcaagaagctccgcctctccaaggaccaagccgccgtcctcgaggacaccttcaaagagcacaacaccctcaatcccaagcagaaggcggcgctggcgaggcagctgaatctgaagccgcggcaggtggaggtgtggttccagaacaggagggcgaggacgaagctgaagcagacggaggtggactgcgagctgctcaagcgctgctgcgagacgctcaccgacgagaaccgccgcctccaccgcgagctccaggagctccgcgccctcaagctcgccaccgccgccgccgcgccgcaccacctctacggcgcccgcgtcccgccgcccaccaccctcaccatgtgcccctcctgcgagcgcgtcgcctccgcagccaccaccacccgcaacaactccggcgccgcccccgcgcggccggtgcccacccgcccgtggccgccggcggcggcgcagaggtcgtcggcgtag

SEQ ID NO: 248 - protein, 311 aa, Oryza sativa
MEMMVHGRRDEQYGGLRLGLGLGLSLGVAGGAADDEQPPPRRGAAPPPQQQLCGWNGGGLFSSSSSDHRGRSAMMACHDVIEMPFLRGIDVNRAPAAETTTTTARGPSCSEEDEEPGASSPNSTLSSLSGKRGAPSAATAAAAAASDDEDSGGGSRKKLRLSKDQAAVLEDTFKEHNTLNPKQKAALARQLNLKPRQVEVWFQNRRARTKLKQTEVDCELLKRCCETLTDENRRLHRELQELRALKLATAAAAPHHLYGARVPPPTTLTMCPSCERVASAATTTRNNSGAAPARPVPTRPWPPAAAQRSSA

SEQ ID NO: 249 - DNA, 1674 bp, Arabidopsis thaliana
aaaatggaaaactcagacactgattcagaagttttcttttggtttcagaaccaaaaccaaaaccatagccataagtttccttcttcttgttttcctccgagctctcactctgctttttatggatctagctcaatgatcaacacagagactgcaactatggacgaagaagacgtatgtgagagctacatgatgcgtgagataaccaagaaacggaagctaacaccgatccaattgcgtttactagaggagagtttcgaagaagagaaaagactcgaaccagacaggaaactctggctagccgagaagctagggctgcagccaagccaagtcgctgtctggttccaaaacagaagagctagatacaagaccaaacagctcgaacacgactgtgactctcttaaagctagctatgctaagctcaagactgactgggacattctctttgtacaaaaccaaaccctcaagagcaaggtacagtttcttaatagattaacaagccactattttcaagagtctgttcaaaattttgatgacacattcaaacaggtcgatcttctcaaagagaagctgaaaatgcaagagaatcttgaaactcagtctattgagaggaaaagacttggggaagaaggtagttcggtgaaaagcgataacacgcagtacagtgaagaagaaggtttggagaatcaatacagtttcccggagcttgcagttctcggattttattatgatccaaccttaactgcttcaaatctaagacaagaacctttgaaagtcacgtgtgcggatcagatgactcagatccaaatatctgacgtcacagaacctgcgagctccgcacataaaaaaattgaagtgacacagcgaagttcgagtatgagccgcaagagagataaaccctacacaaaccgtcacacaccggcgcgaatttcgaaacgccggcgaccatgggcgccttcgtcatcggagcacgatgagattatcgacaaaccgatcaccaaacctccgccgccaccggcgttggtagttatgggacttcccgccaactgttcagttctggagctaaaatctcgattcgagatctacggttcaatctcccgaatccgaatccataaagacggaattggctccgtttcgtatcgaaccgccgagtcagcagaagccgccattgctggtagtcacgagccttctttcggtatctccatcgattccaaaaagttggaggtggtttgggcgacggatccattggtgaagtggaaggaaggtgtgacggcgggagaaggaaaggagagaacgtcgtcgttttcgtcgaagcttttacgacctgtgatgcctttgagaaaacatgggagaagcagtaggttagcgtcagctattgttaatccgagaagtgataatactaaaggaattagtggagatggagggatatcatctccggcgacgacaagtgaagttaaacagagaaatatagtaacctacgacgatatcgtttaacaccattctactacaattatagtaactttgattcttttacatattttggcaattttatgagtttagctaatcctgttggtaatctcagttgtcgaatgttgtgaaatgagttgagttttgtttatttgtatgattgtaacttataagaaagagaaggattccaaaatgggtagaagattcaaa

SEQ ID NO: 250 - protein, 495 aa, Arabidopsis thaliana
MENSDTDSEVFFWFQNQNQNHSHKFPSSCFPPSSHSAFYGSSSMINTETATMDEEDVCESYMMREITKKRKLTPIQLRLLEESFEEEKRLEPDRKLWLAEKLGLQPSQVAVWFQNRRARYKTKQLEHDCDSLKASYAKLKTDWDILFVQNQTLKSKVQFLNRLTSHYFQESVQNFDDTFKQVDLLKEKLKMQENLETQSIERKRLGEEGSSVKSDNTQYSEEEGLENQYSFPELAVLGFYYDPTLTASNLRQEPLKVTCADQMTQIQISDVTEPASSAHKKIEVTQRSSSMSRKRDKPYTNRHTPARISKRRRPWAPSSSEHDEIIDKPITKPPPPPALVVMGLPANCSVLELKSRFEIYGSISRIRIHKDGIGSVSYRTAESAEAAIAGSHEPSFGISIDSKKLEVVWATDPLVKWKEGVTAGEGKERTSSFSSKLLRPVMPLRKHGRSSRLASAIVNPRSDNTKGISGDGGISSPATTSEVKQRNIVTYDDIV

SEQ ID NO: 251 - DNA, 1428 bp, Arabidopsis thaliana
aaggccacaacagatcttcttgttcctctctctcaatctctctctctaaaactcttattttcttcgtaagagatggaactagcgttgtctctaggcgacaatactaagaaacagttctcttttatggagaagaactcgaagattaataatccctctgtctcgtcgacatctacttccgagaaggatcttgggttctgcatggctttagatgttgcttttggtggtcacagatcgttgtcatcctcttcgtctccgtcggtagaggatgagaagaagaaaccggcgcccagagcaaaaaaatctgacgaatttagggtttcgtcttctgtagatccaccattacagcttcagcttcacttccctaattggctccctgagaacagtaaaggtcgacaaggaggaagaatgcccttaggagcagctacggttgtggaggaggaagaggaggaggaggaagcggtgcctagtatgtcagtatcgccgccggatagtgtaacgtcgtcgtttcaattggactttgggattaaaagttatggttatgagagaagaagcaataagagagatattgatgatgaagtggagagatcagcttcaagagccagcaacgaagacaacgatgacgagaatggatccactaggaagaaacttagactctccaaagaccaatctgcttttcttgaagacagcttcaaagaacacagtacccttaatcctgttcgtgtcccattctttacagtttttatttatttaaaatttgtctttcttgaatttattctatttttttagtaccaaattttagccttaatgcttttttttttctttctaaaacattgcagaaacagaagattgcattggcgaagcagttgaatcttcgtcctcgtcaggttgaagtctggtttcaaaacagacgagccaggacaaagctgaagcaaacggaagtggactgtgaatacctaaagagatgctgtgagtcactaaccgaagaaaaccggaggcttcaaaaagaggttaaagaattgagaaccttgaagacttccacacccttttacatgcaacttccggccactactctcactatgtgcccttcttgtgaacgtgttgccacttcagcagcacagccctccacgtcagctgcccacaacctctgtttgtccacgtcatcattgattccggttaagcctcggccggccaaacaagtttcatgaaagcacctgcgaaatacagtttgagcaaacggtcgagctagagtggttttaaaagttgtcttcttgtgtatatatttattttacttttcatattttattagagaccgctattttgaaagacgaatagattgattatccggttagtgttttgtttttcttagataggaccggataaaaaacagatggagcaaaagggttgacatgttttattgaatgatagagg

SEQ ID NO: 252 - protein, 237 aa, Arabidopsis thaliana
MELALSLGDNTKKQFSFMEKNSKINNPSVSSTSTSEKDLGFCMALDVAFGGHRSLSSSSSPSVEDEKKKPAPRAKKSDEFRVSSSVDPPLQLQLHFPNWLPENSKGRQGGRMPLGAATVVEEEEEEEEAVPSMSVSPPDSVTSSFQLDFGIKSYGYERRSNKRDIDDEVERSASRASNEDNDDENGSTRKKLRLSKDQSAFLEDSFKEHSTLNPVRVPFFTVFIYLKFVFLEFILFF

SEQ ID NO: 253 - DNA, 1167 bp, Arabidopsis thaliana
tgcccccagctagtcacatactcatgattgcaaaatctctctctctctctgcctctctatatattaacctttcttcttcctttactttctcatcttctatctctcaaaagaaaagcagacaactttatttgcaaaaacagagtttttttttcttatcttgagaaagttcaacagaagatgatgttcgagaaagacgatctgggtctaagcttaggcttgaattttccaaagaaacagatcaatctcaaatcaaatccatctgtttctgttactccttcttcttcttcttttggattattcagaagatcttcatggaacgagagttttacttcttcagttccaaactcagattcgtcacaaaaagaaacaagaactttcatccgaggaatcgacgtgaacagaccaccgtctacagcggaatacggcgacgaagacgctggagtatcttcacctaacagtacagtctcaagctctacagggaaaagaagcgagagagaagaagacacagatccacaaggctcaagaggaatcagtgacgatgaagatggtgataactccaggaaaaagcttagactttccaaagatcaatctgctattcttgaagagaccttcaaagatcacagtactctcaatccgaagcagaagcaagcattggctaaacaattagggttacgagcaagacaagtggaagtttggtttcagaacagacgagcaagaacaaagctgaagcaaacggaggtagactgcgagttcttacggagatgctgcgagaatctaacggaagagaaccgtcggctacaaaaagaagtaacggaattgagagcacttaagctctctcctcagttctacatgcacatgagcccacccactactttgaccatgtgcccttcatgtgaacacgtgtcggtcccgccaccacaacctcaggctgctacgtcagcgcaccaccggtcgttgccggtcaatgcgtgggctcctgcgacgaggatatctcacggcttgacttttgacgctcttcgtcctaggtcctaagtctttttacttgcaaccaaagggcattttggtcgttttttaagtttcatggaccagatatgcatgtagttgttaacatgtatgtattttcttagaaagaaagaaaaacagattaatatttttctagcttaaacc

SEQ ID NO: 254 - protein, 284 aa, Arabidopsis thaliana; identical to SEQ ID NO: 230

SEQ ID NO: 255 - DNA, 1194 bp, Arabidopsis thaliana
atttcacatctctctctctctataagaaccctagaagaaggtttctcttgtcctccatacacttagcacaactgataaatcttttgaggtaaaatcagctttagatcaaggtttttctagtcatctctactcataaagatcaaagcttttgctattctcattttctaccaagagacaatatcatgatgatgggtaaagaggatttgggtttaagtcttagcttgggatttgcacaaaaccatcctctccagctaaatcttaaacccacttcttcaccaatgtccaatctccagatgtttccatggaaccaaacccttgtttcttcctcagatcaacaaaagcaacagtttcttaggaaaatcgacgtgaacagcttgccaacaacggtggatttggaagaggagacaggagtttcgtctccaaacagtacgatctcgagcacagtgagtggaaagaggaggagtactgaaagagaaggtacctccggtggtggttgcggagatgaccttgacatcactctagatagatcttcctcacgtggaacctccgatgaagaggaagattacggaggtgagacttgtaggaagaagcttagactatccaaagatcaatccgcagttctcgaagacactttcaaagagcacaatactctcaatcccaaacagaagctggctttggctaagaagctaggtttaacagcaagacaagtggaagtgtggttccaaaacagaagagcaaggacaaagttaaagcagaccgaagtggattgcgagtatttgaaaagatgtgttgagaaattaacggaagagaatcggcggctcgagaaagaggcagcggaactaagagcattaaagctttcaccgcggttgtatggtcagatgagtccaccgaccacacttttgatgtgtccatcgtgtgaacgtgtggccggaccatcctcatctaaccacaaccagcgatctgtctcattgagtccatggctccaaatggcccatgggtcaacctttgatgtgatgcgtcctaggtcttaactttaatgctgcttctatgggttgtgtgtgggtcattgtactttttagattattgactctcagctaatgtatccttaaaagcctttttctacttttaaatttactttaatctaattaaattagttattcttgtcttcttgataacaaacaaatttataataat

SEQ ID NO: 256 - protein, 282 aa, Arabidopsis thaliana
MMMGKEDLGLSLSLGFAQNHPLQLNLKPTSSPMSNLQMFPWNQTLVSSSDQQKQQFLRKIDVNSLPTTVDLEEETGVSSPNSTISSTVSGKRRSTEREGTSGGGCGDDLDITLDRSSSRGTSDEEEDYGGETCRKKLRLSKDQSAVLEDTFKEHNTLNPKQKLALAKKLGLTARQVEVWFQNRRARTKLKQTEVDCEYLKRCVEKLTEENRRLEKEAAELRALKLSPRLYGQMSPPTTLLMCPSCERVAGPSSSNHNQRSVSLSPWLQMAHGSTFDVMRPRS

SEQ ID NO: 257 - DNA, 1284 bp, Arabidopsis thaliana
aataatgatggattgtaattagccacctgacaaaatctctcatcattcaaagtactatattaatcccctctcttcttcattaccatctcacatctctctctatttctcttccacaaagagtcctaacttcgagttgaaacaaacaccatttctcatctctatctcagaaagaacaaaccatttcgtgttctttctttctctattctcataaggaaatataattcctgaaactgttgagttcttgtgaaaggaaataaaaaacatgatgatgggcaaagaagatctaggtttgagcctaagcttagggttttcacaaaatcacaatcctcttcagatgaatctgaatcctaactcttcattatcaaacaatctccagagactcccatggaaccaaacattcgatcctacatcagatcttcgcaagatagacgtgaacagttttccatcaacggttaactgcgaggaagacacaggagtttcgtcaccaaacagtacgatctcaagcaccattagcgggaagagaagtgagagagaaggaatctccggaaccggcgttggctccggcgacgatcacgacgagatcactccggatcgagggtactcacgtggaacctcagatgaagaagaagacgggggcgaaacgtcgaggaagaagctcaggttatcaaaagatcagtctgcttttctcgaagagactttcaaagaacacaacactctcaatcccaaacagaagctagctttggctaagaagctgaacttgacggcaagacaagtggaagtgtggttccaaaacagaagagctagaaccaagttaaagcaaacggaggtagattgcgaatacttgaaacggtgcgtagagaagctaacggaagagaaccggagacttcagaaagaggctatggagcttcgaactctcaagctgtctccacaattctacggtcagatgactccaccaactacactcatcatgtgtccttcgtgcgagcgtgtgggtggcccatcatcatcgaaccatcaccacaatcacaggcccgtttctatcaatccgtgggttgcttgtgctggtcaggtggctcatgggctgaattttgaagccttgcgtccacgatcgtgattttttattttagtggtgggaaaagggtgttttggtatttttcgttatcgttatatagtctatctgtgtggggtcattgtaattttggatgattggccttctcatgaactagtcctatgtatgatgcaaccttaaaaagatttaaattagcaaaaattagttacaaactt

SEQ ID NO: 258 - protein, 283 aa, Arabidopsis thaliana
MMMGKEDLGLSLSLGFSQNHNPLQMNLNPNSSLSNNLQRLPWNQTFDPTSDLRKIDVNSFPSTVNCEEDTGVSSPNSTISSTISGKRSEREGISGTGVGSGDDHDEITPDRGYSRGTSDEEEDGGETSRKKLRLSKDQSAFLEETFKEHNTLNPKQKLALAKKLNLTARQVEVWFQNRRARTKLKQTEVDCEYLKRCVEKLTEENRRLQKEAMELRTLKLSPQFYGQMTPPTTLIMCPSCERVGGPSSSNHHHNHRPVSINPWVACAGQVAHGLNFEALRPRS

SEQ ID NO: 259 - DNA, 957 bp, Arabidopsis thaliana
atgggggaaagagatgatgggttgggtttgagtctaagcttgggaaatagtcaacaaaaagaaccatctctgaggttgaatcttatgccgttgacaacttcttcttcttcttcttcgtttcaacacatgcacaatcagaataacaatagccatccccagaagattcataacatctcttggactcatctgtttcaatcttctgggattaaacgtacaactgcagagagaaactccgacgccgggtcatttctaagaggtttcaacgtgaacagagctcagtcttcggtggcggtagtggacttggaagaagaagccgccgtcgtctcgtctccaaacagcgccgtttcgagtctgagtggaaataaaagggatcttgcggtggcgagaggaggagatgaaaacgaggcggagagagcttcttgctcacgcggagggggaagcggtggtagcgacgatgaagacggcggaaacggcgacggatcaaggaagaaactacggttatcgaaggatcaagctcttgttctcgaggagacttttaaagaacatagcactcttaatccgaagcaaaagctggctctagcaaaacagttgaatctaagggcaagacaagttgaagtgtggtttcagaaccgtagggcaaggacgaagctgaaacaaacggaggttgattgtgagtatttaaagagatgttgcgataatctgaccgaggagaatcgacggctgcagaaagaagtgtcggagctgagggcgttgaagttgtctccacatctctacatgcacatgactcctcctactactctcaccatgtgcccttcttgcgaacgtgtctcctcctctgccgccactgtgaccgctgctccttccactactactactcctacggtggtggggcggccaagtccacagcgattaactccttggactgctatttctctccagcaaaaatcaggtcgctag

SEQ ID NO: 260 - protein, 318 aa, Arabidopsis thaliana
MGERDDGLGLSLSLGNSQQKEPSLRLNLMPLTTSSSSSSFQHMHNQNNNSHPQKIHNISWTHLFQSSGIKRTTAERNSDAGSFLRGFNVNRAQSSVAVVDLEEEAAVVSSPNSAVSSLSGNKRDLAVARGGDENEAERASCSRGGGSGGSDDEDGGNGDGSRKKLRLSKDQALVLEETFKEHSTLNPKQKLALAKQLNLRARQVEVWFQNRRARTKLKQTEVDCEYLKRCCDNLTEENRRLQKEVSELRALKLSPHLYMHMTPPTTLTMCPSCERVSSSAATVTAAPSTTTTPTVVGRPSPQRLTPWTAISLQQKSGR

SEQ ID NO: 261 - DNA, 1357 bp, Arabidopsis thaliana
ccacaaccccatatctctttgtctgaaaaaactcttttgcatatataaataaatataagccatatcttttgaaactgtactgctgcacaagtgtagaggcagtggcacaacatctttaagaaagagagagagaaagagtcatttattcatttcctcgcttaaaaatcttgagcacccagacagaattcttctttcttctttctggggttgagaaaaatgagtgaaagagatgatggattggggctaagtttgagcttgagtttaggttttaatcaaaaggacccgtcttcgaggttaaatccaatgcctctggcttcttatgcatcttcatcacacatgcagcatatgcagcagagcaattataaccatcctcaaaagattcagaacacttggattaacatgtttcagtcatcagagagaaactcggacatgagatcgtttctccggggaatagacgtgaacagagctccatcgacggtggtggttgacgtggaggatgaaggcgccggagtttcgtctccgaacagcaccgtctcaagcgtgatgagcgggaagaagagcgagcgagagctaatggctgcggcaggtgcagttggaggaggtagagtagaagataatgagattgagagagcttcttgctcgctcggcggtggtagcgacgatgaagacggtagcgggaacggagatgacagttcgaggaagaaactccgattgtctaaagaacaagctttggttcttgaagaaacttttaaagaacatagtacactcaatccgaagcaaaagatggctttggctaagcaattgaatctgaggacgagacaagttgaagtgtggttccaaaaccgaagggcaaggacgaagctgaagcaaacggaagtagactgtgaatatcttaagagatgttgcgagaatctaacggatgagaatcggagattgcaaaaggaagtgagtgagcttagggctttaaagctttctccacacttatacatgcacatgaaacctcccactactctcacaatgtgtccttcttgcgagcgagtcgctgttacgtcatcttcgtcatcggtggctcctcctgtgatgaattcatcgtctccgatgggtccgatgagtccgtgggctgccatgcctctacggcaacgacctgctgctggttctcattagagtttaattagtctaaagataataggtttggtgatttgtttttattatattgttgaacggacttggaagttcttttcaagagttggtcccatgctcttctttcctttgttttattcagtttctatttatagctgaattctggataatggaaaatctactaatattattgtccaattattagtttggggaaaga

SEQ ID NO: 262 - protein, 315 aa, Arabidopsis thaliana
MSERDDGLGLSLSLSLGFNQKDPSSRLNPMPLASYASSSHMQHMQQSNYNHPQKIQNTWINMFQSSERNSDMRSFLRGIDVNRAPSTVVVDVEDEGAGVSSPNSTVSSVMSGKKSERELMAAAGAVGGGRVEDNEIERASCSLGGGSDDEDGSGNGDDSSRKKLRLSKEQALVLEETFKEHSTLNPKQKMALAKQLNLRTRQVEVWFQNRRARTKLKQTEVDCEYLKRCCENLTDENRRLQKEVSELRALKLSPHLYMHMKPPTTLTMCPSCERVAVTSSSSSVAPPVMNSSSPMGPMSPWAAMPLRQRPAAGSH

SEQ ID NO: 263 - DNA, 744 bp, Oryza sativa
atgatggagagggccgaggacctgcgcctgagcctcagtctcagctcgccgcttattgctcctcgtactcaccatgtcgccatgctgttccacgctcctccagagaaaagattcctggagatgccgctgctccctgctgcgaagcggagcgaggtcgtcgcggcagaagaggagcgcgcgggcctgcgcggcggcggcggcagcgacgaggaggacggtggctgcggcatcgacggctcacgcaagaagctccggctttccaaggaccagtccgccgtgctcgaggacagcttccgggagcaccccaccctcaaccccaggcagaaggcaactttggcgcagcagctcgggcttcggcctcggcaggtcgaggtgtggtttcagaacagacgcgcaaggacgaagctgaagcagacggaggtggactgcgagttcctgaagcgctgctgcgagacgctcacggaggagaaccggaggctgcagaaggaggtgcaggagctgcgagcgctcaagctcgtctcgccgcacctctacatgaacatgtccccgcccaccacgctcaccatgtgcccctcctgcgagcgcgtctccaacaccaataacaactccagcgccgccgccgccgccgaccgccgcggcatcaggactactactgccgcaggcggcggcagcgtcgtcgacaccgccgccgacgggggcatcctctgccaccgcccgatcgccgtccggccgcagcagtcatga

SEQ ID NO: 264 - protein, 247 aa, Oryza sativa
MMERAEDLRLSLSLSSPLIAPRTHHVAMLFHAPPEKRFLEMPLLPAAKRSEVVAAEEERAGLRGGGGSDEEDGGCGIDGSRKKLRLSKDQSAVLEDSFREHPTLNPRQKATLAQQLGLRPRQVEVWFQNRRARTKLKQTEVDCEFLKRCCETLTEENRRLQKEVQELRALKLVSPHLYMNMSPPTTLTMCPSCERVSNTNNNSSAAAAADRRGIRTTTAAGGGSVVDTAADGGILCHRPIAVRPQQS

SEQ ID NO: 265 - DNA, 846 bp, Oryza sativa
atgaggtcgtacatggacggcggcggcgcggcggcgtacgaggaggaggaggaggaggttgaggacgacgacggcggcggcggcggcggcggcggcggcggcggtggggggctcggggagaagaagcggcggctggcggcggagcaggtgcgggcgctggagcggagcttcgaggcggacaacaagctggacccggagcggaaggcccggatcgcccgcgaccttcgcctccaccctcgccaggtcgccgtctggttccagaaccgccgcgcgaggtggaagaccaagcagatcgagcgcgacttcgccgccctccgctcccgccacgacgccctccgcctcgagtgcgacgccctccgccgcgacaaggacgccctcgccgccgagatcgccgacctccgggacagggtggacggccagatgtccgtcaagctggaggccgtggccgcggacgaacaccagccgcctccgccgccgccgccgccgccactggcgtataacagcaaggtggtggacggctcgacggacagcgactcgagcgcggtgttcaacgaggaggcgtcgccgtactccggcgcggccatcgaccaccaccaccaccaaactccggcgagctacgacacggcggggttcacctccttcttcgcgccatccaccacgctcacctcgtccctctccttcccttccatgttccacgcgtcatcgcatttcgatggccaccaagaactcctcgtcggcggcggcggcgccggcgcagtggccgacgccgacctcggaggcgccggattcttcgccggcgacgagcacgccggcggcctctcctggtacggcgccgagggttggtag

SEQ ID NO: 266 - protein, 281 aa, Oryza sativa
MRSYMDGGGAAAYEEEEEEVEDDDGGGGGGGGGGGGGLGEKKRRLAAEQVRALERSFEADNKLDPERKARIARDLRLHPRQVAVWFQNRRARWKTKQIERDFAALRSRHDALRLECDALRRDKDALAAEIADLRDRVDGQMSVKLEAVAADEHQPPPPPPPPPLAYNSKVVDGSTDSDSSAVFNEEASPYSGAAIDHHHHQTPASYDTAGFTSFFAPSTTLTSSLSFPSMFHASSHFDGHQELLVGGGGAGAVADADLGGAGFFAGDEHAGGLSWYGAEGW

SEQ ID NO: 267 - DNA, 918 bp, Oryza sativa
atgaagaggcccagctgcagaggctcctccatggccatcatccatgacacctctgatcaacaagaggacaacatgaggtcgtacatggacggcggcggcgcggcggcgtacgaggaggaggaggaggaggttgaggacgacgacggcggcggcggcggcggcggcggcggcggcggtggggggctcggggagaagaagcggcggctggcggcggagcaggtgcgggcgctggagcggagcttcgaggcggacaacaagctggacccggagcggaaggcccggatcgcccgcgaccttcgcctccaccctcgccaggtcgccgtctggttccagaaccgccgcgcgaggtggaagaccaagcagatcgagcgcgacttcgccgccctccgctcccgccacgacgccctccgcctcgagtgcgacgccctccgccgcgacaaggacgccctcgccgccgagatcgccgacctccgggacagggtggacggccagatgtccgtcaagctggaggccgtggccgcggacgaacaccagccgcctccgccgccgccgccgccgccactggcgtataacagcaaggtggtggacggctcgacggacagcgactcgagcgcggtgttcaacgaggaggcgtcgccgtactccggcgcggccatcgaccaccaccaccaccaaactccggcgagctacgacacggcggggttcacctccttcttcgcgccatccaccacgctcacctcgtccctctccttcccttccatgttccacgcgtcatcgcatttcgatggccaccaagaactcctcgtcggcggcggcggcgccggcgcagtggccgacgccgacctcggaggcgccggattcttcgccggcgacgagcacgccggcggcctctcctggtacggcgccgagggttggtag

SEQ ID NO: 268 - protein, 305 aa, Oryza sativa
MKRPSCRGSSMAIIHDTSDQQEDNMRSYMDGGGAAAYEEEEEEVEDDDGGGGGGGGGGGGGLGEKKRRLAAEQVRALERSFEADNKLDPERKARIARDLRLHPRQVAVWFQNRRARWKTKQIERDFAALRSRHDALRLECDALRRDKDALAAEIADLRDRVDGQMSVKLEAVAADEHQPPPPPPPPPLAYNSKVVDGSTDSDSSAVFNEEASPYSGAAIDHHHHQTPASYDTAGFTSFFAPSTTLTSSLSFPSMFHASSHFDGHQELLVGGGGAGAVADADLGGAGFFAGDEHAGGLSWYGAEGW

SEQ ID NO: 269 - DNA, 936 bp, Oryza sativa
atgaagaggcccaccagcagcagccgaaaatccaaaaaacaaggagaggacctggcgttctctgaggagggcagcttgcccgcggtgaccatggagcagaaagatgaagccgagatggaggaggtggacgaggaggaggaggaggaggtcgacgaagacatggccggcgggcacgcggcgcagtcgccgtcgccgtcgtgcgggctgggcgagaagaagcggcggctggcgctggagcaggtgcgcgctctggagcggagcttcgacacggacaacaagctggacccggaccgcaaggcccgcatcgcgcgcgacctcggcctgcagccgcgccaggtcgccgtctggttccagaaccgccgcgcccggtggaagacgaagcagctcgagcgcgacttcgccgccctccgcgcccgccacgacgccctccgcgccgactgcgacgccctgcgccgcgacaaggacgccctcgccgccgagattcgggagctgagggagaagctgcccaccaagccggcggacacggcggcatcggtgaaggtagaagccggcaatgacgcggcggccggcgccgcggccgccacggtgtgcaaggacggctcgtcggacgacagcgactccagcgtggtgttcaacgacgaggcgtcgccgtactccggcgcggccttcattggattcggcccgtcgttcttggtcgacgacgcgtcggcggcaaccgtgggctgctcgtcgtcgctccccgcgctcgagtccaaatggcacggtccgtactccgacgactcgtgcaaaggcggcgtctatggcttcacggaggaatggctcgctgcctgctccggcgagatggccggcaacgacgccgccggcttcttctccgacgagcacgcctccaacctcaacttcggttggtgcgcgagtggtaacgagggttgggaatga

SEQ ID NO: 270 - protein, 311 aa, Oryza sativa
MKRPTSSSRKSKKQGEDLAFSEEGSLPAVTMEQKDEAEMEEVDEEEEEEVDEDMAGGHAAQSPSPSCGLGEKKRRLALEQVRALERSFDTDNKLDPDRKARIARDLGLQPRQVAVWFQNRRARWKTKQLERDFAALRARHDALRADCDALRRDKDALAAEIRELREKLPTKPADTAASVKVEAGNDAAAGAAAATVCKDGSSDDSDSSVVFNDEASPYSGAAFIGFGPSFLVDDASAATVGCSSSLPALESKWHGPYSDDSCKGGVYGFTEEWLAACSGEMAGNDAAGFFSDEHASNLNFGWCASGNEGWE

SEQ ID NO: 271 - DNA, 810 bp, Oryza sativa
atgagaagtccagcagcgcttctcccggtggttgcagatggtggtggtggtgttggggtggaggaggagatggatgtggacgaggacatggcgatgtgcggcggccgcggcggcggcggcggggagaagaagcggcggctgagcgtggagcaggtgcgcgcgctggagcggagcttcgagacggagaacaagctggagccggagcggaaggcgcggctggcgcgcgacctcgggctgcagccgcgccaggtcgccgtctggttccagaaccgccgcgcgcggtggaagaccaagcagctcgagcgcgactacgccgcgctccgccaatcctacgacgcgctccgcgccgaccacgacgcgcttcgccgcgacaaggacgccctcctcgccgagatcaaggagctgaaggggaagctcggcgacgaggacgccgcggcgagcttctcgtcggtgaaggaggaggaggacccggcggcgtccgacgccgaccccccggccaccggcgcgccgcagggctcgtccgagagcgactcgagcgcggtgctgaacgacgcggagatccttccacacaagccagcgccggcggccgccgccgacgccgcggcctcggaggagacggaggcggtggtgaccggcgccgcgctgctccaccacgccgaggtgttcttccacgggcagcttctcaaggtggacgacgacgaggcggcgttcctaggcgacgacggcgcggcgtgcggcggcttcttcgccgacgagcatctcccgtcgctgccgtggtgggccgagcccaccgagcaatggacgacctag

SEQ ID NO: 272 - protein, 269 aa, Oryza sativa
MRSPAALLPVVADGGGGVGVEEEMDVDEDMAMCGGRGGGGGEKKRRLSVEQVRALERSFETENKLEPERKARLARDLGLQPRQVAVWFQNRRARWKTKQLERDYAALRQSYDALRADHDALRRDKDALLAEIKELKGKLGDEDAAASFSSVKEEEDPAASDADPPATGAPQGSSESDSSAVLNDAEILPHKPAPAAAADAAASEETEAVVTGAALLHHAEVFFHGQLLKVDDDEAAFLGDDGAACGGFFADEHLPSLPWWAEPTEQWTT

SEQ ID NO: 273 - DNA, 834 bp, Oryza sativa
atgaagcgacccggcggtgccggcggcggcggaggcagcccatcgctcgtcacgatggctaattctagtgatgatggatatggaggggttgggatggaggcggagggggacgtggaggaggagatgatggcgtgcggcggcggcggggagaagaagcggcggctgagcgtggagcaggttcgcgcgctggagcggagcttcgaggtggagaacaagcttgagcctgagcggaaggcgcggctggcgcgcgacctcggcctgcagccgcgccaggtcgccgtctggttccagaaccgccgcgcgcggtggaagaccaagcagctcgagcgcgactacgccgcgctccgccattcctacgactccctgcgcctcgatcacgacgcgctccgccgcgacaaggacgccctcctcgccgagatcaaggagctgaaggcgaagctcggggacgaggaggcggcggcgagcttcacgtcggtgaaggaggagccggcggcctccgacgggccaccggcggcgggatttgggtcgtccgacagcgactcaagcgcggtgctgaacgacgtggacgcggccggcgccgcgcccgcggcgacggacgcgctggctccggaggcgtgcacgtttctcggcgcgccgcccgccgcgggcgcgggcgcgggcgcagcggcggcggcgagccacgaggaggtgttcttccacggcaatttcctcaaggtggaggaggacgagacggggttcctcgacgacgacgagccgtgcggcgggttcttcgccgacgatcagcccccgccgctgtcgtcgtggtgggccgagcccacggagcactggaactga

SEQ ID NO: 274 - protein, 277 aa, Oryza sativa
MKRPGGAGGGGGSPSLVTMANSSDDGYGGVGMEAEGDVEEEMMACGGGGEKKRRLSVEQVRALERSFEVENKLEPERKARLARDLGLQPRQVAVWFQNRRARWKTKQLERDYAALRHSYDSLRLDHDALRRDKDALLAEIKELKAKLGDEEAAASFTSVKEEPAASDGPPAAGFGSSDSDSSAVLNDVDAAGAAPAATDALAPEACTFLGAPPAAGAGAGAAAAASHEEVFFHGNFLKVEEDETGFLDDDEPCGGFFADDQPPPLSSWWAEPTEHWN

SEQ ID NO: 275 - DNA, 375 bp, Oryza sativa
atgtcatcctctctctttcttcttcctcctctctttctttctctcttctctccccttcggctagccgcagggagcacgggctggggcggtagtgggcggggacaagagaggcggagggagctgaagcggcgccggcggcggcacacgctctccagcctcagcggcaagcgtggtgcgccatctgccgctgccgccgccgtcggcggcagcgacgacgaggactccgacgacggatcccgcaagaagctccgcctctccaaggaccaagccgccgtcctcgaggacaccttcaacaagcacaacaccctcaaccccaagcagaaggcggcgctggcgaggcagctgaatctgaagccgcggcaggtggaggtgtag

SEQ ID NO: 276 - protein, 124 aa, Oryza sativa
MSSSLFLLPPLFLSLFSPLRLAAGSTGWGGSGRGQERRRELKRRRRRHTLSSLSGKRGAPSAAAAAVGGSDDEDSDDGSRKKLRLSKDQAAVLEDTFNKHNTLNPKQKAALARQLNLKPRQVEV

SEQ ID NO: 277 - DNA, 1767 bp, Oryza sativa
atgttttattcaagtcccttttgttcatctcctttgcagattccatttctgacccaaattttggctattcctcatgatgagtttgtctcaaactggtgctctgttaatctgccagtgatagaagaagacgctaatcttgattatgatccatttggtgcagctgagctggcactggcagctgctggtaataagttaactgaagctaaagcaaactattcttgcccttttcgccctatcagtatgccttctatagcatatgcgcagacaagaacatcatgtgtggtgaaaataatagcaaatttgcatgtttttgtcccaaacatatgcgaagagcaagaaagagacctttttcttcagaaatttcagaagtacttggtatcagggaatcctagatcatcagttgatcatccagcatcagctgatctcaaggccactacagtttgcagaaacttgggatctttgtctgagtatgctagatcgttaattcctaataacttgttaaacgaggaagatgtgcaattgttaagtgaatttgcttataagttacaaacttggtgtaaatcacatgttggacagagtacatcccaggcagtaaagattgatccgtcatcagaaagcaaggaagactttaagccactgcagcatcccttgataccaagtactgttgttccagattccagtataaataaccttccgaagaacatggaagagcctacaccaacaaacatggaagagcctgcaccaacaccctcaacaaagcaagagggaaatgccagggatgagactcctagaagcactgtcgctttaaatggtgggttcctgcagaattcagtcggccaggacttagtccatcttggtgtggcgagaactagttcaggctttctagggggaggtaccagtacaagtacaggatccctgcgctgcaaaatggatcttgatcctgcatccagcagtatggaccatttcaaaacaccagatagaaaagaaagtggtcttcaggatgatgagaaaggagacactcacatgtatgatgagagacaacctaagagaaggaagcgaaccattatgaatgataggcaaataaacgaaatcgagaaggctcttattgatgagcctgagatgcataagaatgctgctttactgcaggcatggtcagagaagttaagtgggcagggctcggagattacgtcatctcagctaaagaattggctgaacaacagaaaagctaagcttgctcgtattgcgaaagaaagaggagtactatctgagggtgagaacgcagataagccatctacgccagctactccccaccactgtgactcctcagaaagtgctggcgaggagagctacttgccacctgcgagggtcatgagtgctctaggcatatccaagggcagcagatttgtgagcccagatggcaatgagacaacatcacaggcagaattcaatcaaaatatcatgcttagccgccctttcacaagatcattctcatttgaacctggccgtcttgtttcgctcattgataatgatgggaaggaggttggcaggggaaagatcttccaagttgaggggagactgcaagggaaggccctgacagatactcgcgtttgcatcgttgatgttattgagctcaagattgagaaatggcgggagctacctcatccctcggaagcatcaggaagaacattccaagaggcagaatcaaggaacggtggtgtgatgagggtcgcgtgggatgtcatcagactatctccagtggttcagtaa

SEQ ID NO: 278 - protein, 588 aa, Oryza sativa
MFYSSPFCSSPLQIPFLTQILAIPHDEFVSNWCSVNLPVIEEDANLDYDPFGAAELALAAAGNKLTEAKANYSCPFRPISMPSIAYAQTRTSCVVKIIANLHVFVPNICEEQERDLFLQKFQKYLVSGNPRSSVDHPASADLKATTVCRNLGSLSEYARSLIPNNLLNEEDVQLLSEFAYKLQTWCKSHVGQSTSQAVKIDPSSESKEDFKPLQHPLIPSTVVPDSSINNLPKNMEEPTPTNMEEPAPTPSTKQEGNARDETPRSTVALNGGFLQNSVGQDLVHLGVARTSSGFLGGGTSTSTGSLRCKMDLDPASSSMDHFKTPDRKESGLQDDEKGDTHMYDERQPKRRKRTIMNDRQINEIEKALIDEPEMHKNAALLQAWSEKLSGQGSEITSSQLKNWLNNRKAKLARIAKERGVLSEGENADKPSTPATPHHCDSSESAGEESYLPPARVMSALGISKGSRFVSPDGNETTSQAEFNQNIMLSRPFTRSFSFEPGRLVSLIDNDGKEVGRGKIFQVEGRLQGKALTDTRVCIVDVIELKIEKWRELPHPSEASGRTFQEAESRNGGVMRVAWDVIRLSPVVQ

SEQ ID NO: 279 - protein, 6 aa, Artificial sequence
  motif I
RKKLRL

SEQ ID NO: 280 - protein, 24 aa, Artificial sequence
  motif II
TKLKQTEVDCEFLRRCCENLTEEN

SEQ ID NO: 281 - protein, 10 aa, Artificial sequence
  motif III
TLTMCPSCER

SEQ ID NO: 282 - DNA, 2193 bp, Oryza sativa; identical to SEQ ID NO: 54

SEQ ID NO: 283 - DNA, 58 bp, Artificial sequence
  primer: p01294
ggggacaagtttgtacaaaaaagcaggcttcacaatgatgttcgagaaagacgatctg

SEQ ID NO: 284 - DNA, 52 bp, Artificial sequence
  primer: p00402
ggggaccactttgtacaagaaagctgggtttaggacctaggacgaagagcgt

SEQ ID NO: 285 - DNA, 622 bp, Arabidopsis thaliana
atgagcagacccggagattggaactgcaggtcatgcagccatctcaacttccagcgccgtgactcttgccagcgatgcggtgactctcgttccggccccggtggagttggtggcttagactttggtaatttcggtggcagagccatgtctgctttcggattcaccaccggctccgacgttcgtcccggtgattggtactgcaccgtgggaaactgcgggacacacaacttcgccagtcgctccacctgcttcaaatgcggcactttcaaggacgagaccggcgctggaggcggaggtggtggcatcggcggtccggccatgtttgacgccgacattatgcggtctagagtccccggtaacggtggtcgctctagctggaaatccggcgactggatttgcactaggattggttgcaatgagcataactttgcaagcagaatggaatgcttcaggtgcaatgcaccaagggacttcagcaacagaacctctttctaagttatacaaactgcttttgaagtagccttgtctacccagctttcttgtacaaagttggcattataagaaagcattgcttatcaatttgttgcaacgaacaggtcactatcagtcaaaataaaatcat

SEQ ID NO: 286 - protein, 164 aa, Arabidopsis thaliana
MSRPGDWNCRSCSHLNFQRRDSCQRCGDSRSGPGGVGGLDFGNFGGRAMSAFGFTTGSDVRPGDWYCTVGNCGTHNFASRSTCFKCGTFKDETGAGGGGGGIGGPAMFDADIMRSRVPGNGGRSSWKSGDWICTRIGCNEHNFASRMECFRCNAPRDFSNRTSF

SEQ ID NO: 287 - DNA, 717 bp, Gossypium hirsutum
atgagcaggccaggagattggaactgcaggtcatgccaacacctcaacttccaaaggagggacaactgccaacgttgcggtgaatctcgatacggtgttagagtcggctcgacattcgggtttaccgctggctcggacgttcgacctggtgactggtattgcacggctggaaactgcggcacccacaatttcgccagccggtctacttgtttcaattgcggcgcgttcaaggacgagtcggctggaggtttcgacttggacatgtctcgatcaagagggttcggaggtaaccgatccggctggaaatcaggggattggatatgtaccaggttagggtgcaatgaacataattttgctagcagaatggaatgtttcagatgcagtgctccaagagaattcaacaatagaacttcatattaaatcacatgcatgctactatatccatttttgggtgttttgaggcaattaataggagattataatgagagagtgttactggctttgatgatgaacaccacaagcattttgtcatgtttcttttataagattcatggcaatgtagtactttttcttgtgatgattatttatggtttcaattctatggttttattgtcttttattttagagagttttatttatatttttgtaatggtgctttggctttattaaaagaagatgattctcttctgtcttttcaaaaaaaaaaaaaaaaaaaaa

SEQ ID NO: 288 - protein, 139 aa, Gossypium hirsutum
MSRPGDWNCRSCQHLNFQRRDNCQRCGESRYGVRVGSTFGFTAGSDVRPGDWYCTAGNCGTHNFASRSTCFNCGAFKDESAGGFDLDMSRSRGFGGNRSGWKSGDWICTRLGCNEHNFASRMECFRCSAPREFNNRTSY

SEQ ID NO: 289 - DNA, 937 bp, Zea mays
cgggcacgaccagcaacacaacagccgagctttgcttaggcaagatgaacaggaagccaggagactgggactgcagggcgtgccagcacctcaacttcagccgccgagacatatgccagcgctgcagcgagccacgtggagttgctgatcgtggcagtggcggcggcggaggaggcgactacgccagcttcggtggccgcggtggctcctccttcggcggcggctttggcgctgctggctccgacgtccgccctggtgactggtactgctcctgcggcgcgcacaacttcgccagccgctccagctgcttcaagtgctccgcctacaaggaggaggccgctgtgaacagtggcgctggcggctttgatggcgacatgtcacgctcacggggctacggcttcggcagcggtgctgctgctgctgctggtgctggcgctgcccgtactaccaaccgccccggttggaagtccggagactggatctgcaccagatccggatgcaacgagcacaacttcgccagcaggatggagtgcttcaggtgcaacgcaccgcgggactctggcactgaggtgtaggatcgagcaagttaaaaagtctgcagcgccgaagaaagcgacgacaagaggagtcctcatcacgtcgtaacgtaagagagagagtagtggatttgcaacaaaaaaaaaaaaaagacggccgcgatgctctgttactagctagctagttttgttcaaccacccatgccgtctcttctcttttattagatttggtttggttctcatagccctttaattaccatttgggacctatgtttgctgttctgtttcccgttcgtctcctccgcatgtttgcgcttggatcgagtcttgtgatgtaaccccccaaaaaacgcttgcttaactagtactgttgcttcttaataaaaaaaaaaaaaaaaaaa

SEQ ID NO: 290 - protein, 176 aa, Zea mays
MNRKPGDWDCRACQHLNFSRRDICQRCSEPRGVADRGSGGGGGGDYASFGGRGGSSFGGGFGAAGSDVRPGDWYCSCGAHNFASRSSCFKCSAYKEEAAVNSGAGGFDGDMSRSRGYGFGSGAAAAAGAGAARTTNRPGWKSGDWICTRSGCNEHNFASRMECFRCNAPRDSGTEV

SEQ ID NO: 291 - DNA, 501 bp, Oryza sativa
atgaacaggaagccaggagactgggactgcagggcgtgccagcacctcaacttcagccgccgggacctatgccagcgctgcggcgagccgcgtggcgccgctgatcgcggcagcggtggtggcggtgactacgccaacttcggcggccgtggtggttcctccttcggtggaggctttggcactggctctgatgtccgcccaggtgactggtactgcaactgcggcgcgcacaacttcgccagccgctccagctgcttcaagtgcgctgctttcaaggacgatgctgccgtcaacagtggcggcgctggtgcctttgatggtggggacatgtcgcgctcgcggggctacggcttcggcagcggcgccgtccgcgccagccgccctggctggaagtctggcgactggatttgcaccaggtctggatgcaatgagcacaacttcgccagcaggatggagtgcttcaggtgcaacgcaccgcgggactccggcactgaggtgtaa

SEQ ID NO: 292 - protein, 166 aa, Oryza sativa
MNRKPGDWDCRACQHLNFSRRDLCQRCGEPRGAADRGSGGGGDYANFGGRGGSSFGGGFGTGSDVRPGDWYCNCGAHNFASRSSCFKCAAFKDDAAVNSGGAGAFDGGDMSRSRGYGFGSGAVRASRPGWKSGDWICTRSGCNEHNFASRMECFRCNAPRDSGTEV

SEQ ID NO: 293 - DNA, 859 bp, Arabidopsis thaliana
ataagctcttacactcatttcaactctctttttcgtttccattaccctcagaagaagatgaataggccgggagattggaactgcagattgtgtagccacctcaacttccagaggagggattcatgccaacgttgtagagagcctagaccgggcgggatcagtaccgatttactcagcggttttggtggccgtccggttagtagctccttcggtttcaacaccgggcccgatgtgcgacccggggattggtattgcaaccttggggattgtgggacacataattttgccaataggtccagttgtttcaagtgtggtgccgcaaaagatgagttttcatgctcaagtgctgctgcaacaaccgggtttatggacatgaatgttggtccgagacgtggcctttttggttttggcggcagcagtagtggtggtggtggtacgggccgttctccttggaaatctggagattggatttgcccaaggtcaggctgtaacgaacataacttcgcaagcaggtcagagtgtttcaggtgtaacgcaccaaaggaacttgccaccgaaccaccctattagtcatttagtcctcctaccttcttcatcatttccaatactctggaagcattagaggagagcagaaaggtgaagaatcgaagcaagataccgaccgcccttaatctcttgatttgtttaatttcttagatttgactcgttttatatctcgtagtagtcagacctatgttagaatgtaagcatgtcgagagttttccgaagcattttgttctgatatcggtctcctagctagtatgtaagtttgtttgaatgtattcttatttctgataaagttgtttccttctgattccgc

SEQ ID NO: 294 - protein, 170 aa, Arabidopsis thaliana
MNRPGDWNCRLCSHLNFQRRDSCQRCREPRPGGISTDLLSGFGGRPVSSSFGFNTGPDVRPGDWYCNLGDCGTHNFANRSSCFKCGAAKDEFSCSSAAATTGFMDMNVGPRRGLFGFGGSSSGGGGTGRSPWKSGDWICPRSGCNEHNFASRSECFRCNAPKELATEPPY

SEQ ID NO: 295 - DNA, 834 bp, Oryza sativa
cctagtactaagaacagcaaccacctctgaaagctttacaagttcgcaggggcttaactgcgaatgaacatccagaggaagccaggagactggaactgcaaatcgtgccagcatctcaacttcagccgccgggactactgccagcgctgccataccccacgccaggacctgccgcttggcgatggttatgtcccaggtggtgtgctgtcctccctggacattcgcccgggcgactggtactgcaactgcggctatcacaactttgctagccgagcaagctgcttcaaatgtggcgccattgtgaaggaccttccagcaggccaaggtggtggtgttgccaacggtgactttgcccgtgccctcgacagcagcgcagttcgtgctgggtggaaggcgggtgactggatttgcacaaggcctggttgcaacgtccacaactttgcaagtaggattgagtgctataggtgcaatgcacctagggaagcaggtaatgtgaagtaagaaaagactgacgcgaccaaagatcgtgagacgtgacgagctggccgaggatgaataaagtgactgctgtcagttgtcacattcacaggctgcgatccagaaactatggatgggactatgtagtaacgtgctgatatattattgctaagtgttactactgcatggttgcaagggtggtagaagtaccttagcttccaagatcgttgtaatgtgtgagtttaattttggcgttttaagtaataagtctagtgattgcaggattgtacggggtaatgtacttgcattatccattataatcttaagcatccaatataattatgcaaaaaaaaaaaa

SEQ ID NO: 296 - protein, 145 aa, Oryza sativa
MNIQRKPGDWNCKSCQHLNFSRRDYCQRCHTPRQDLPLGDGYVPGGVLSSLDIRPGDWYCNCGYHNFASRASCFKCGAIVKDLPAGQGGGVANGDFARALDSSAVRAGWKAGDWICTRPGCNVHNFASRIECYRCNAPREAGNVK

SEQ ID NO: 297 - DNA, 958 bp, Oryza sativa
aagcctccatccatccatccattcatcagagctcaagctcaagcaagcaagcttgctagctagctgctgagcagcattccagtctgctccagctagctcagctctctctgctctgctctttgctcgataacgaccatcatcttcttcttcttcttcttcttcttcttcttcttcttcttgtacattctatttgctcgatagatagatagatagatagataggtagatagagatggagacgaaggcggcggcgatggcgatgaggaagccgggggactggagctgcaggtcgtgccagtacgtgaacttctgcaagagggaggcgtgccagcggtgcggggaggcgaagctcggggtggagcggacggactacgccgccatgggcggcgggtgggaggtgaagcccggcgactggtgctgccgctgctgcgccgtcaacaactacgccagccgcggcagctgcttcaagtgcggcgccgccaagaacgactccgccgccgccgtcgcccagggctggggcttctccgtcgcctcccaggccggctggaagaacggcgactggatctgccccagaatggaatgcaacgtgcagaactacgctaacagaaccgagtgcttccggtgcaatttccccagatactacgttgattgatctgacatatatgatatatgccttgcactgagaagaaatgaaagggaaataaaatttacgagatcgaagatcgacggacaagattgatcggccaccggtcatgcccttcagggttttcttttttctatttttttttagaataaccctcgataacctgagggttttttttcatttgtaagagcggtaacggtactaaaaaaacacaaaaacggcacaaaattgtggctgatgactgatcagtcttcctcttttttttcccaataaaaggcagataattaagaaagcaaaattattaaaaaaaaaaaaa

SEQ ID NO: 298 - protein, 139 aa, Oryza sativa
METKAAAMAMRKPGDWSCRSCQYVNFCKREACQRCGEAKLGVERTDYAAMGGGWEVKPGDWCCRCCAVNNYASRGSCFKCGAAKNDSAAAVAQGWGFSVASQAGWKNGDWICPRMECNVQNYANRTECFRCNFPRYYVD

SEQ ID NO: 299 - DNA, 519 bp, Beta vulgaris
atgagtaggccaggtgattggaattgtaggtcatgcagccacttgaacttccaaaggagggactcctgccagcgctgtggggacgtacgtcctgacggccgaggcggcggagggggaggaggagactttggcagtagctttggagggaggtcaggtgggtccccctttggtgggggttttgcagggcccgatgttaggcccggtgattggtattgtagcattggcaactgtggggcccacaactttgccagcaggtctagctgcttcaagtgtggggcctacaaagaggaagctggctgtggtgatagcatgggccgttcacgtggaggattttcctttggtggcatcggcggtggcggtagcggtgccgctaccggccgctcaggctggaaatccggtgactggatttgcactaggtcgggttgcaacgagcataacttcgctagtaggactgagtgcttcagatgcagggaaccaagggactccggtaatgcaatgctaaaggaagtaccatgctga

SEQ ID NO: 300 - protein, 172 aa, Beta vulgaris
MSRPGDWNCRSCSHLNFQRRDSCQRCGDVRPDGRGGGGGGGDFGSSFGGRSGGSPFGGGFAGPDVRPGDWYCSIGNCGAHNFASRSSCFKCGAYKEEAGCGDSMGRSRGGFSFGGIGGGGSGAATGRSGWKSGDWICTRSGCNEHNFASRTECFRCREPRDSGNAMLKEVPC

SEQ ID NO: 301 - DNA, 807 bp, Arabidopsis thaliana
atgggagacggaagagaaggagactgggaatgtttaggatgcagaaacaggaattatgcgtttagatcattctgtaacagatgcaagcagcctcgtcttatcatggataataatacttctccaaactctaagtggcttcctcgtatcggcgattggatctgcactggttgtactaacaacaattatgcatcacgagaaaagtgcaagaaatgtgggcaatctaaggaagtagcagcattgtcagcacttgctatccctggagcttctcttcaaactcatctccattacttcacccgtggacctgagtcacatgatcaacctggttctttactcgcattctctaacgctacaaatcaagcttcggttcataaagaatggaggagtggtgactggatttgcagatgtggttttcacaattattcctctcgtatacagtgcaaaaagtgcaatgaaatagctccactagcccttggtacaaagagattagcatcagaagctttggctcatgaatgggatagcaaaagactgaatcaaggatatacaagcatgcaaacacagtcagcgatatatgcatcttttcctggtatgagcctaggaagggtctcaaattggcaacttcctctcccgtttctacaacaacactcaacacctgctttacttggaatgggagtgaaacaatggcgtgatggcgactggatgtgtacaaattgcaagaatcacaattatgcatcacgagcagagtgcaataggtgcaagactacacgagatatccttgatcaggacataactccaacagaacaatcttga

SEQ ID NO: 302 - protein, 268 aa, Arabidopsis thaliana
MGDGREGDWECLGCRNRNYAFRSFCNRCKQPRLIMDNNTSPNSKWLPRIGDWICTGCTNNNYASREKCKKCGQSKEVAALSALAIPGASLQTHLHYFTRGPESHDQPGSLLAFSNATNQASVHKEWRSGDWICRCGFHNYSSRIQCKKCNEIAPLALGTKRLASEALAHEWDSKRLNQGYTSMQTQSAIYASFPGMSLGRVSNWQLPLPFLQQHSTPALLGMGVKQWRDGDWMCTNCKNHNYASRAECNRCKTTRDILDQDITPTEQS

SEQ ID NO: 303 - DNA, 1264 bp, Arabidopsis thaliana
ctatttctcctaccgtcgaactaaatcctagggcacaggtgaaatcgccgagtgacgtctagccaccgcaccgcctccttctccggttatctcgctactaatcagactattccacagctatgtcacaggtagacaacagaaattcatcagcagccaagcgtgctagaactgacggggggcgtagagaagatgattggatctgcccaagttgtggcaatgtcaacttttcattcaggacaacttgcaatatgcgtaattgcactcagcctagacctgcagatcataatggaaagtctgctcccaaacctatgcaacatcaacaaggtttctcatcacccggggcatacttaggatctgggggtccccctccagtatatatgggcgggtcaccatatggatctcctctctttaatggatcatctatgcctccttatgacgtcccattttctgggggttcgccttaccattttaactataatagccgaatgcctgccggagctcattacagaccattacatatgtctggaccaccaccataccatggcggatctatgatgggaagtggtggtatgtatggaatgcctccaccaatagacaggtatggccttggtatggcaatgggtcctggttctgccgctgccatgatgccaagaccaaggttttacccagatgaaaaatcacaaaagagagattcaactcgcgataatgattggacatgtccgaattgtggtaatgtaaacttctcattcagaactgtatgtaacatgaggaagtgcaacactccaaagcctggttctcagcagggtggaagctcagataaaatatccaaacaaaatgcaccggaagggagctggaagtgtgataactgtggaaatataaactacccattcaggagcaaatgcaacaggcaaaactgtggagctgataagcctggggatcggtcgaatggatctccgtcccgtgcaccagaagagaacgatcagtgagtcgtagacatgtttgggggttgagaagggtgagtctaatccagcgggtgtcgtaatgtcagtcaatgtctcgtcaggtcaggtcgtccatgttgctgcgtcgtcagtcaagttgcttctatgcatttgtctctttacttcccttgcgtggttgtggattgtattaataatgcaaaaattgtttatttactttgtcgtcctcgtggatcttgtcttgctatagaatcctcctccaggtccatactgttttacatcctaatcttaagtaagttggcacc

SEQ ID NO: 304 - protein, 288 aa, Arabidopsis thaliana
MSQVDNRNSSAAKRARTDGGRREDDWICPSCGNVNFSFRTTCNMRNCTQPRPADHNGKSAPKPMQHQQGFSSPGAYLGSGGPPPVYMGGSPYGSPLFNGSSMPPYDVPFSGGSPYHFNYNSRMPAGAHYRPLHMSGPPPYHGGSMMGSGGMYGMPPPIDRYGLGMAMGPGSAAAMMPRPRFYPDEKSQKRDSTRDNDWTCPNCGNVNFSFRTVCNMRKCNTPKPGSQQGGSSDKISKQNAPEGSWKCDNCGNINYPFRSKCNRQNCGADKPGDRSNGSPSRAPEENDQ

SEQ ID NO: 305 - DNA, 1853 bp, Oryza sativa
cagtttccactttcttccaaagccgaaaaatcgagagagaaagagcaaaaccctaaccgcggcgctccgcccccttccgccgccggattcctcctcctccttcgtccgccttcgccggcgccgccctgctccgaaggagcccaggccttgtcgccgcgtcgcttgccccgccgccggtttcagcagcagccacccccaccaccatgtcttctcaggtcgacaaccgtagccaatctgctggaaagcgtgcccgcaccgacggtgggcggcgtgaggacgactgggtttgccccagctgccagaacgtcaacttcgccttccgcaccacctgcaacatgcgcaattgcaaccaatccaggcccaccgactatacgaaggatatgcagaaacctatgcagacaccgccgccccatttccccatgtcagggggatacatgagcccagggacgccgccatccatgtacctcgggggtggtgctcccccttatggcacctccctctatggcggacctgctttaccacgttatggtattgctcagttccctgggggttctggatatccatatggctatggtggccgcctgccaatggggagcccctatgggccgccgatgcatatggcagggcctccatattctgctggatccatgatgggaccaggtggaatgtatgggatgcccatggacagatatagcttgggcttacctgctggtcctggtccaatgggcgcgagggctggttcatattccgaggaaggatcccagaagaagcctgcaggagctgggcgtgataatgattggaaatgccctaattgcaacaacattaactttgcattccggacagtctgtaacatgagaaagtgcaatacaccaagacctgaaaaccaggggtccaaacctgatggtgcaagaggtccaaaaccaaagatgccagaaggtagttggaagtgcgagaagtgcaataacataaactatccattccgcacaaaatgtaaccgtccaagttgcgaggctgaaaagccatttcagacaaacaatgctaatgagtcatctgctgatcaggacaatcagttgttgtcatgtaatattgtgaagcttttatcaaagctgcaactttcacatgactttcaagacaataatgagcaaacaaaggtggatcctcccggtggccctgctggagtaccgacaagttcgcacgccctgcgaatggcagctctcagtgagttgcagaacagtgttaagagctgatacccttttcattttccaaacaaggtgagaactttgatccatgtggatgtgcttctatcaggagcagctgacagtattgcatgcagtgatcttgctaaggaagttggagatgggaaacatcgtgtgatggccagccttgatgtaagaatgcaaatcagtcttactccgtaccatatctgtgtggagtgtgcacaccggaagcatagtcattttttgaatggtcgattgcttcttccacagtaaagtctataataccagtgtgcaggtgtttttttccctttctttcagtgtgaaggtgtttttttacccctttctttcgttcattcattctttttctttttccttgttgagacggtatcctggagcactttgtaatactctaatgtgcttcggaaagtagaatataagttgtgcttatgggcgggccaaaatgctttggccgttagttgcatgacagcctttccaacatgctgctgcctagccgtagttctcccaaaaatgaaaccatcttgagatccgtttgcggttgaactgaaattagacggtatctctggtttcaacatcatcctttaaaccctggatgaaagatttgcaatattcctgcgg

SEQ ID NO: 306 - protein, 347 aa, Oryza sativa
MSSQVDNRSQSAGKRARTDGGRREDDWVCPSCQNVNFAFRTTCNMRNCNQSRPTDYTKDMQKPMQTPPPHFPMSGGYMSPGTPPSMYLGGGAPPYGTSLYGGPALPRYGIAQFPGGSGYPYGYGGRLPMGSPYGPPMHMAGPPYSAGSMMGPGGMYGMPMDRYSLGLPAGPGPMGARAGSYSEEGSQKKPAGAGRDNDWKCPNCNNINFAFRTVCNMRKCNTPRPENQGSKPDGARGPKPKMPEGSWKCEKCNNINYPFRTKCNRPSCEAEKPFQTNNANESSADQDNQLLSCNIVKLLSKLQLSHDFQDNNEQTKVDPPGGPAGVPTSSHALRMAALSELQNSVKS

SEQ ID NO: 307 - DNA, 1078 bp, Oryza sativa
ctggtctctcgctctcttcgctcgcggcggcttctccgcctccgcctccgccgccctctcctcctctcgcctcgccgccggcgccgccagccaccgcgcgggtcgggcgggccgtatcttcctttctgttccgatggcttccgcgaaggtggagaaccgcggcggcggtgggttcggttcgaagaggtcacgcaacgacgtgtctgtaagggagggggactggacttgtcctcagtgtggtaatgtcaacttcagttttagaaatgtttgcaaccgcggagcctgtggtgcaccccgtccatcaccgagtctaagcccaagagtgccacctcctcctgctgctggatatgatcggccacatcttggatatgatcggccacatctgttttatggtagtgctggcaccccacctcctattcctcttggatctggtagctatggtgccccctatccacatcttggcttgcggtatggatatggtccaccagtaggacctcctgcttcatatggccttttttcttcttatggtcaacctggaccaatgggcagtccgatgggaggcatgggctatggccctggacctgagctaggccgatatggttatggttttagaggatctccaatgccggtttctagcccatggtctggtggagcattagtggaaaataatgacagctctgcttcacgcaagcgtcgtggaggcccagatggaatggctgagaatgactggatctgcccaaagtgtgagaatgtcaacttttccttcagaaacagttgcaatatgaagaaatgtggagctccaaggccaagccctggatctaatgctaccccatgtcgcaaagacaaggacgctccggaagggagctggacctgcccggagtgcaacaacctgaactaccctttccgcacggcgtgcaatcggaaaggctgcggaagcagcaggccggcagcggccacggcgaactaggaccctactaactttgcgccggcgattgggggcagagagagtattgttgtatcctagctatatacaagttaatttaaactgtaaacggctcaaatatattttcttgtggcc

SEQ ID NO: 308 - protein, 277 aa, Oryza sativa
MASAKVENRGGGGFGSKRSRNDVSVREGDWTCPQCGNVNFSFRNVCNRGACGAPRPSPSLSPRVPPPPAAGYDRPHLGYDRPHLFYGSAGTPPPIPLGSGSYGAPYPHLGLRYGYGPPVGPPASYGLFSSYGQPGPMGSPMGGMGYGPGPELGRYGYGFRGSPMPVSSPWSGGALVENNDSSASRKRRGGPDGMAENDWICPKCENVNFSFRNSCNMKKCGAPRPSPGSNATPCRKDKDAPEGSWTCPECNNLNYPFRTACNRKGCGSSRPAAATAN

SEQ ID NO: 309 - DNA, 662 bp, Brassica rapa
ggtcttgttttctttcaataaacacataataagatagcttccaagttcatcaagaaataaacgtaagcgcacgcatacaataacctatcgaagatgagcagacccggagactggaactgtagatcatgcacccacctcaacttccagcgccgtgattcttgccagcgatgcggtgactcccgtttgggtgcaggtggagtcggtggcttagagtttggtgatttcggcggcagaggtatgtctgcttttggattcaccacgggctccgacgttcgtccaggtgactggtactgcacagttggaaactgcgggacacataactttgccagccgctccacctgcttcaaatgcggcactttcaaggacgaatccctcggtgggggcggcggcggtggcgtaggcgtaaggcggtccggtcatgttgacgctgacgttatgcggtctagagtctccggcaacggtggccgctccagctggaaatccggtgattggatttgcaccaggcttggttgcaatgagcataactttgcaagcagaatggagtgcttcagatgcaatgcaccaagggacttcagcatgagaacctctttctaagttacacaataatgcctttgaagtagccttgtttccaatctcttgggcaccgtttcaatcaatggaaa

SEQ ID NO: 310 - protein, 166 aa, Brassica rapa
MSRPGDWNCRSCTHLNFQRRDSCQRCGDSRLGAGGVGGLEFGDFGGRGMSAFGFTTGSDVRPGDWYCTVGNCGTHNFASRSTCFKCGTFKDESLGGGGGGGVGVRRSGHVDADVMRSRVSGNGGRSSWKSGDWICTRLGCNEHNFASRMECFRCNAPRDFSMRTSF

SEQ ID NO: 311 - DNA, 749 bp, Euphorbia esula
attttcccttcttcacccaaatatctctcaccttttaacaagagaaaagcaaaaagaagatgagcagaccaggagattggaactgcaggtcctgccagcatctcaacttccagagaagggactcgtgccagcgctgtggggactccaggtccgggactggaggttcaggagctgactttggcgggtttggaagccgggttgggtcctcattcgggttcagcaccgggtctgatgttcgacccggtgactggtactgtactgctggcaactgtggggcccacaactttgccagccgggcaagttgcttcaaatgtggagtttataaggatgattctggggcccctggcgggtttgattccgatatcctccgggcctctagaggttttggtagtggcagcaatcgctcttcttggaaatctggtgattggatctgcactcggtggggatgtaatgaacacaactttgcaagcagaatggagtgtttcaaatgcagtgcccctagggaccttagtaacagaacttcatactagacattttggatggtgcagcagccaagaaagagaattaagattactacttttaaattttattttatttttactatttgttttgggtgttattagagtggaaaacaaacatggcttaaaaacccatgtttcatccctaatttaagctaaggaagcaaaccccttttggcattttgtaaggcagatttaggattgtagtacttaattaattagtgggttgtt

SEQ ID NO: 312 - protein, 156 aa, Euphorbia esula
MSRPGDWNCRSCQHLNFQRRDSCQRCGDSRSGTGGSGADFGGFGSRVGSSFGFSTGSDVRPGDWYCTAGNCGAHNFASRASCFKCGVYKDDSGAPGGFDSDILRASRGFGSGSNRSSWKSGDWICTRWGCNEHNFASRMECFKCSAPRDLSNRTSY

SEQ ID NO: 313 - DNA, 646 bp, Gossypium hirsutum
ctccattctcttatttaactcaaactcaccaccttttccatttttctaattaagaaaagaaaagatgagcaggccaggagattggaactgcaggtcgtgccaacacctaaacttccaaaggagggactcctgccaacgctgcggggaattccggtcgggtgatcacttcggtagctacggtggtggcaggggtggctcctcctttggattcgccaccggctccgacgtccgacctggtgattggtactgcactgcgggaaactgcggtacccacaatttcgccagtcgttccagctgcttcaaatgtggtgcattcaaggacgaccctgccggaggtttcgacagcgacgttccgcgttctagaggatttggcggcggtaatcgatccggctggaaatccggcgactggatatgtaccaggtcgggatgcaatgagcataactttgctagccgaatggaatgtttcagatgcagtgccccaagagacttcaccgctagaacttcatactaaatacaagctatccagttttgggtgttgcaaaccaagagagactcaaatgagagaaaaaattttacggggttagggttacccgggtaaatatatggcttgggggggtgtggcaccagggttgaaaacaccagggtg

SEQ ID NO: 314 - protein, 148 aa, Gossypium hirsutum
MSRPGDWNCRSCQHLNFQRRDSCQRCGEFRSGDHFGSYGGGRGGSSFGFATGSDVRPGDWYCTAGNCGTHNFASRSSCFKCGAFKDDPAGGFDSDVPRSRGFGGGNRSGWKSGDWICTRSGCNEHNFASRMECFRCSAPRDFTARTSY

SEQ ID NO: 315 - DNA, 613 bp, Vitis vinifera
ggtcttcttccatctctgcacagttatcctgatatttccttggaaaacatgagcaggccaggagattggaactgcaggtcatgccagcacatgaacttccaaaggcgcgattcctgccaacgctgcggtgacccaaaatcgggtgggggtgactttggaagctttggtgggaggggtggatcctcctttgggttcacgggctcggatgtccgcccaggggactggtactgcaatgcaggcaactgtggagctcacaactttgctagccgctctaactgcttcaagtgtggtgcattcaaagatgagtctgctgggggctacgattccgacatgtcacgctcccgaggtttcgggttcggcggtggcagcggccggtctgggtggaaatccggtgattggatatgcagcaggtctggatgcaatgagcacaactttgctagcagaatggaatgtttcagatgcaatgccccgagggacttgagtaacaaaacttcatactagacatatatcttccatttttgggtactgcagccagccaagagagaccaaatcatagaatatctattaatccttgtgttgttattaatttctttgctttgggtgctaggttctt

SEQ ID NO: 316 - protein, 150 aa, Vitis vinifera
MSRPGDWNCRSCQHMNFQRRDSCQRCGDPKSGGGDFGSFGGRGGSSFGFTGSDVRPGDWYCNAGNCGAHNFASRSNCFKCGAFKDESAGGYDSDMSRSRGFGFGGGSGRSGWKSGDWICSRSGCNEHNFASRMECFRCNAPRDLSNKTSY

SEQ ID NO: 317 - DNA, 844 bp, Populus trichocarpa
tcagaccatttccctttcatcttctagctagcatagcttctctcagaggtttttgaaacccctttttgccattcttctctcacttagtatacttagtcttctctaatcaattcataagcaaatatgaacaggccaggagactggaactgcaggtcatgccaacacctcaatttccagaggcgtgactcttgccaacgttgtggggaccccaggtccgcaggtgattttgggggtttcggtgggcggggtggctcatcacttgggttcaccgggtcggatgttcgtcccggtgattggtactgcactgccggaaactgcggggcccacaactttgctagccgttctagttgcttcaaatgtggagtgtacaaggaaatggactccgccgggggcttcgattctgatttttctcgaactagagggtttggtgggagcactggaggtggcaatcgatctggatggaaatccggagactggatttgcactaggtggggatgcaacgaacataactttgctagcagaatggagtgcttcaagtgcaatgccccaagagatcttagcaacagaacttcatactagatacaatttctccatttcctgggactgcaccagccaagaacaaagacaacatgattaaaaaatatatatcactacttttcattttcttcttgatttctttttgtattagctagctagggtcttgaggcgagacatggtttaagaaccatgtttactgctttgagctatatataacccttggcattttgtcaggcttcctgtaggaagtatatcgttgtctttgtgggcttttgatctattatattcattattgtaaccaagggag

SEQ ID NO: 318 - protein, 151 aa, Populus trichocarpa
MNRPGDWNCRSCQHLNFQRRDSCQRCGDPRSAGDFGGFGGRGGSSLGFTGSDVRPGDWYCTAGNCGAHNFASRSSCFKCGVYKEMDSAGGFDSDFSRTRGFGGSTGGGNRSGWKSGDWICTRWGCNEHNFASRMECFKCNAPRDLSNRTSY

SEQ ID NO: 319 - DNA, 785 bp, Gossypium hirsutum
ccttgcgtccgctttcttcttcattgttcctgtctttgcttactcaccccttatatatctgctttctcaagtaggggagaaaatatgagcaggccaggagactggaattgcaggtcatgccaacacctcaacttccaaaggagggactcatgccagcgctgtggagaaccaagacctggtggtggtgacagaggcggcgactatggaagctttggtggcaggggtggctcatctttcgggtttactggacccgatgttaggcctggtgactggtattgcactgtgggcaactgcggtgctcacaacttcgccagcaggtcgagctgcttcaaatgtggtgcggccaaagatgaatcatccggaggatttgaaagtgacatcccacgtatgaggggttatggttttagcactggcagctctagtcgctctaactggaaatctggagactggatttgcaccaggtcgggttgcaatgaacacaacttcgccagcaggatggaatgtttcagatgcaatgcaccaagggactccacccacaaatcttcatactaattaataaaattttcatttttgggtactgcagtcgcaagagagagatcagacaaggcaatcccagatcttgctttctttttcttttgtttgtttctttattttagatctttagatgaatcatgtttgaaagacttcagttgaagtacttaagctaatatcaaagtacatagggcatgcatgtaattgatgtatggtatcagcaatgttatatcagtgtctttgtgccaaaaaaa

SEQ ID NO: 320 - protein, 155 aa, Gossypium hirsutum
MSRPGDWNCRSCQHLNFQRRDSCQRCGEPRPGGGDRGGDYGSFGGRGGSSFGFTGPDVRPGDWYCTVGNCGAHNFASRSSCFKCGAAKDESSGGFESDIPRMRGYGFSTGSSSRSNWKSGDWICTRSGCNEHNFASRMECFRCNAPRDSTHKSSY

SEQ ID NO: 321 - DNA, 760 bp, Lactuca serriola
gtattcggaatcctcaaagaaacacacacttcctatccatcacaagaaagatgagcaggccaggagattggaactgcaggtcatgccagcacttgaacttccagaggagggactcttgccaaagatgtggggagacgaggtatggtggtgggggtggtgtgtttggtggtagaggaagtatcatcagcccttcagcatttggcttcacaggcccagatgtccgaccgggtgattggtactgcaatgttggcaactgcggggctcacaactttgctagccgctcgagctgcttcaagtgtggtgcgttcaaggatgacttagcttgtagtggtggtggtggtggtggtggtggcgtttttgatggtgatatgtcacgtggcaggggtttcgggtttggtggaggaagtggtggtggaggtggtggcagcagccgttcagggtggaagtccggtgactggatatgcggcaggcctggttgcaatgagcacaactttgcaagcagaatggaatgttttaggtgcaacgcacctcgggaatcgggtaacaagtctccttattaagcaggttgcggcatttccagttccgggtatcatggacttgctatctaccaaacaggaagagagataagtgatcgatcagacagaatcatgaagagcatccagttgataggaaattctaaactgaccccctttttgcccatatcataatatgcaatcctatctttgattttttttttccttttgttttatttttttttttt

SEQ ID NO: 322 - protein, 169 aa, Lactuca serriola
MSRPGDWNCRSCQHLNFQRRDSCQRCGETRYGGGGGVFGGRGSIISPSAFGFTGPDVRPGDWYCNVGNCGAHNFASRSSCFKCGAFKDDLACSGGGGGGGGVFDGDMSRGRGFGFGGGSGGGGGGSSRSGWKSGDWICGRPGCNEHNFASRMECFRCNAPRESGNKSPY

SEQ ID NO: 323 - DNA, 517 bp, Glycine max
tttctgcatctctaatacttcaactcactgtattatcttgagtaattttgcagagaagtaaaatatgagcaggccaggagactggaattgcaggtcgtgccagcacctgaactttcagaggagagactcatgccagcgatgtggggactcaaaatatggagatagagttgttgattttggtggttttggaggaagaggagggtcctcatttggtttaactggctcagatgttcgccccggcgactggtactgtgctgctgctaactgtggtgcacacaactttgctagccgctcaagctgcttcaagtgtggtgctttcaaggatgacttggctggaggaggctataacagttctgacatcttgcgctccagagcttttggtggcagtggaagacctggatggaaatctggtgattggatatgcagcagatcaggatgcaatgagcacaactttgctagcagaatggaatgttttaaatgcagtgctcccagggacacgtactagaaaaaatgagtt

SEQ ID NO: 324 - protein, 146 aa, Glycine max
MSRPGDWNCRSCQHLNFQRRDSCQRCGDSKYGDRVVDFGGFGGRGGSSFGLTGSDVRPGDWYCAAANCGAHNFASRSSCFKCGAFKDDLAGGGYNSSDILRSRAFGGSGRPGWKSGDWICSRSGCNEHNFASRMECFKCSAPRDTY

SEQ ID NO: 325 - DNA, 889 bp, Populus trichocarpa
gacaagttccttaaacaatctattgctctttcaactactagctaggttacacttcatttctgtacgtgttaattctcctatctttctcctttctgctttctcgagatgagcagaccaggagattggaattgcaggtcatgccagcacttgaactttcaaaggagggactcatgccagcgttgcggtgatccaaggcccggagagagagatcactatggaagtttcggtggaagatcatcagggggctcattcggatttacgggccctgatgttaggcctggtgattggtattgcacggctggcaattgtggagctcacaactttgctagtcgttcaagctgcttcaagtgtggtgtgtccaaggatgaatcctctggtggtggacttgatgctgatatgtcacggatgagaggttatggcttcggcggaggcggaggcggaggcagtggctctagccgtaattggaaatccggagactggatttgcaccaggtccggttgcaacgagcacaactttgctagcaggactgaatgctatagatgcaatgcaccaagagaatctagcagcaacaagtcttcgtattaatcatcgatatcgatagcatttttgtgtcctgcagtgctgcaaggagggaattaacgaagaaggctcatgagaaatcttggattcatctttttgctcttaattacttctatttttgttcttttggatagctgtactcttaagctgagaagctttagaaggatcatgggagtgaaattaagttcaaggagagctatatatatatcattagccagtaatttgtcaggttccctaaatatagacatgtagttctgtacttggtatcaatgtctttgtgttttgagacgggtttaagcccttgtcgttc

SEQ ID NO: 326 - protein, 159 aa, Populus trichocarpa
MSRPGDWNCRSCQHLNFQRRDSCQRCGDPRPGERDHYGSFGGRSSGGSFGFTGPDVRPGDWYCTAGNCGAHNFASRSSCFKCGVSKDESSGGGLDADMSRMRGYGFGGGGGGGSGSSRNWKSGDWICTRSGCNEHNFASRTECYRCNAPRESSSNKSSY

SEQ ID NO: 327 - DNA, 723 bp, Populus fremontii x Populus angustifolia
agggaaaaagaaagcctaaccctcctgcctgcctcaagcttaccccattatcgaggtctaaaacaagtataaaaacagccttagccccaatacgtaaatcacaagttccttaaacaatctattgctctttcaactactaggtttcccacttcatttctgtgcctactgattctcctctctttcaactttctgccttctcaagctagctagagaagggaagatgagcagaccaggagattggaattgcaggtcatgccaacacttgaacttccagaggagggactcgtgccagcgttgtggggacccaaggcccggagagagagatcattatggaagttttggtggaagatcagggggctcgttcggatttacggggcctgatgttaggcccggtgactggtattgctcggttggcaactgtggagctcacaactttgctagtcgttcaagctgcttcaagtgtggtatgtccaaggatgaatcctctggtggtgggcttgatgctgacatttcatggatgagaggttatggcttcggcggaggcagcgcctctagccgctctaattggaaatccggagactggatttgcaccaggtcaggttgcaacgagcacaactttgctagcaggactgagtgttacagatgcaatgcaccaagagaatcaggcagcaacaagtcttcgtattaatcatcaacatcgatcgcatttttgtgtactgcagt

SEQ ID NO: 328 - protein, 155 aa, Populus fremontii x Populus angustifolia
MSRPGDWNCRSCQHLNFQRRDSCQRCGDPRPGERDHYGSFGGRSGGSFGFTGPDVRPGDWYCSVGNCGAHNFASRSSCFKCGMSKDESSGGGLDADISWMRGYGFGGGSASSRSNWKSGDWICTRSGCNEHNFASRTECYRCNAPRESGSNKSSY

SEQ ID NO: 329 - DNA, 920 bp, Oryza sativa
cacctcacagcattttccaccttagagctcaccaacacagcagctgatacttgtttagggtaagacaagatgaacaggaagccaggagactgggactgcagggcgtgccagcacctcaacttcagccgccgggacctatgccagcgctgcggcgggccgcgtggcgccgctgatcgcggcagcggtggtggcggtgactacgccaacttcggcggccgtggtggttcctccttcggtggaggctttggcactggctctgatgtccgcccaggtgactggtactgcaactgcggcgcgcacaacttcgccagccgctccagctgcttcaagtgcgctgctttcaaggacgatgctgccgtcaacagtggcggcgctggtgcctttgacggtggggacatgtcgcgctcgcggggctacggcttcggcagcggcgccgtccgcgccagccgccctggctggaagtctggcgactggatttgcaccaggtctggatgcaatgagcacaacttcgccagcaggatggagtgcttcaggtgcaacgcaccgcgggactccggcactgaggtgtaatttgccgtacgtgtccgatcgatctggatccgatgaggcttgcagcagtgacgacgagcagcagaagcagcgttaagagttgtgatgtctacataagaagaagaagaaagtagaatgcaaaagaaatctccccatggttttactagttttgtttcttcccgttttagatttggttctgattcccatttgggaggacccgtcgacccctgattatctatgttttacccgttttatttcctgtttctttcggcatgtttgctcttcgatcgagtcgtgtaacccgaaacgcttgcgcttgagaagtattattattattaactagtatgttgcttcttaaaaaaaaaaaaaaa

SEQ ID NO: 330 - protein, 166 aa, Oryza sativa
MNRKPGDWDCRACQHLNFSRRDLCQRCGGPRGAADRGSGGGGDYANFGGRGGSSFGGGFGTGSDVRPGDWYCNCGAHNFASRSSCFKCAAFKDDAAVNSGGAGAFDGGDMSRSRGYGFGSGAVRASRPGWKSGDWICTRSGCNEHNFASRMECFRCNAPRDSGTEV

SEQ ID NO: 331 - DNA, 703 bp, Panicum virgatum
ccacgcgtccgcagaactccttgtcctaggccccagaaacacaaacgaccgctctttgtttaggcaagatgaacaggaagcctggagactgggattgcagggcttgccaacacctcaacttcagtcggcgggacctatgccagcgctgtggtgagccacgtggagctgctgaccgtggcagcggcggtggaggtgactatgccaacttcggtggccgtggtggctcctccttcggcggtggctttggtgctggctctgatgtccgccctggtgactggttatgttcctgcggcgcgcacaacttcgccagccgctccaactgcttcaagtgctctgccttcaaggaggaggctgctgtcaacagtggtgctggtggctttgatggtgacatgtcacgctcgcgctacggcttcggtggcggtgctgcccgcaccaaccgccctggttggaagtctggagactggatctgcaccaggtccggatgcaacgagcacaactttgccagcaggatggagtgtttcaggtgcaacgcaccacgggactccggcactgaggtgtaggatcggagctggtgcttcgaacggaccccgacgagcagaagcagcaagaaacctgataagaagagtagtagatttgcaaaaggcatcccggatgctctattactgttttgttccacccctaccgcttccttttagaatttggt

SEQ ID NO: 332 - protein, 163 aa, Panicum virgatum
MNRKPGDWDCRACQHLNFSRRDLCQRCGEPRGAADRGSGGGGDYANFGGRGGSSFGGGFGAGSDVRPGDWLCSCGAHNFASRSNCFKCSAFKEEAAVNSGAGGFDGDMSRSRYGFGGGAARTNRPGWKSGDWICTRSGCNEHNFASRMECFRCNAPRDSGTEV

SEQ ID NO: 333 - DNA, 435 bp, Medicago truncatula
atgaacaggaaaatgagctggtctggaggagattggatgtgtggtgcttgcgagcacataaatttcaagaagagagaagcatgccaaaattgtggatacccaaagtatggaggccctgacccatcgacctatagatataacaggactgaaacgttggcaggggactggttttgcacttctatgaactgtggagctcacaactatgcaagccgatcaaactgctatagatgtggtgcatttaaagatccttattcttctggatatgggggtaacatggtgggttctggaggatatggatcagattgtagttctcccccaggatggaaaagtggagactggatttgccctagaattggctgtggaatccataattatgcaagcaggacagagtgctacaaatgcaaaatgccaagggattatggtggtgcagactga

SEQ ID NO: 334 - protein, 144 aa, Medicago truncatula
MNRKMSWSGGDWMCGACEHINFKKREACQNCGYPKYGGPDPSTYRYNRTETLAGDWFCTSMNCGAHNYASRSNCYRCGAFKDPYSSGYGGNMVGSGGYGSDCSSPPGWKSGDWICPRIGCGIHNYASRTECYKCKMPRDYGGAD

SEQ ID NO: 335 - DNA, 513 bp, Medicago truncatula
atgagcagaccaggagattggaactgcaggacatgcaaccacctcaactttcaaagaagagaatcttgccaacgatgtggggagtcaagaatgacttctggctgcggcgccgttgattttggtggctcctttcttggtggaagaggctctagctccccttttcctttcaccaccggccctgatgtccgtcctggtgactggtattgcactgttggaaactgtggagctcacaactttgccagccgctccagctgcttcaaatgtggtgcccctaaggatattgataccttctcctctgactcctcagacatgccacgattattgagatcaccatacggttttggagcaggcagcgctggtggcggtgcctccactcgccccggctggaaatccggtgactggatatgcaccaggtctgggtgtaacgagcataacttcgccaatagaatggaatgctaccgatgcaacggtccaagggactctagtactggaagatcttcctatttatcgtga

SEQ ID NO: 336 - protein, 170 aa, Medicago truncatula
MSRPGDWNCRTCNHLNFQRRESCQRCGESRMTSGCGAVDFGGSFLGGRGSSSPFPFTTGPDVRPGDWYCTVGNCGAHNFASRSSCFKCGAPKDIDTFSSDSSDMPRLLRSPYGFGAGSAGGGASTRPGWKSGDWICTRSGCNEHNFANRMECYRCNGPRDSSTGRSSYLS

SEQ ID NO: 337 - DNA, 826 bp, Yucca filamentosa
ggcacaagctctcacgcaaccccttgtctccattttactcttccttcctctttcaagggacttgagaagatgaacaggaagccaggagactggaactgcaggtcatgccagcaccttaatttcagccgcagggactcgtgccagcgctgcggcgacccccggtcgatcggcagcgagcgatcggactacccgggcttcgtcgggggccgcggggggtcctcattcgggttcagcggctcggacgtcaggcccggggactggtactgccagtgcggggcccacaacttcgccagccgctcgagctgcttcaagtgcaatgctttcaaggatgagtccgccgctagcggcggcctcgacggcggcgacatgctgagatccagggggtttggcttcggcggcggcggcggcgctcgcagtggctggaagtctggtgactggatttgcaacaggtctggctgcaatgagcacaacttcgctagcaggatggaatgcttccgatgcaatgcacctcgagattcgggcactgaggtttaaggagacagccaagagagaagtgacgagatgagatcagtgatgatgataccagtagtaatctcgagttattactagttttgccaccagccccaactttatctccttttgatgtttttttagagcccccttctaaacggaggtgtcttctctttttcatccgtttgtttgcttttgaaagcttgcacttaccctttacacccccccgcccccctccaccttgtagtttgtgttgagagtgtctttgtaagtctttggagaagggctcctttagcttcttgggggagtcccttct

SEQ ID NO: 338 - protein, 154 aa, Yucca filamentosa
MNRKPGDWNCRSCQHLNFSRRDSCQRCGDPRSIGSERSDYPGFVGGRGGSSFGFSGSDVRPGDWYCQCGAHNFASRSSCFKCNAFKDESAASGGLDGGDMLRSRGFGFGGGGGARSGWKSGDWICNRSGCNEHNFASRMECFRCNAPRDSGTEV

SEQ ID NO: 339 - DNA, 614 bp, Hordeum vulgare
cggcacgaggcacttctcatcttggagctcagcagcacagcatccaagctttttcttcggcaagatgaacaggaagccaggagactgggactgcaggtcgtgccagcacctcaacttcagtcgccgggacctatgccagcgctgcggtgagccacgtagtgccgctgaccgtggcagcgtcggtggtgctcttggtggtgactacgccaactttggcggccgtggcgggggtggttcctcatttggtgccggctttggtgccggctctgacgtccgcccgggtgactggtactgcacctgtggagcgcacaacttcgccagccgctccagctgcttcaagtgtgctgctttcaaggaggaagctgccgtcaatggtggcgctggtggctttgatggtgacatgtcacgctcaaggggctttggctttggcgctgtcggtggcatgggtggcggcatgggagccggcgcagccggtggtcgtgccagtcgccctggctggaagtctcgcgactggatttgcaccaggtctggatgcaacgagcacaacttcgccagcaggcaggagtgcttcaggtgcaacgcgccgagggactccggtagcgccacaccatacg

SEQ ID NO: 340 - protein, 183 aa, Hordeum vulgare
MNRKPGDWDCRSCQHLNFSRRDLCQRCGEPRSAADRGSVGGALGGDYANFGGRGGGGSSFGAGFGAGSDVRPGDWYCTCGAHNFASRSSCFKCAAFKEEAAVNGGAGGFDGDMSRSRGFGFGAVGGMGGGMGAGAAGGRASRPGWKSRDWICTRSGCNEHNFASRQECFRCNAPRDSGSATPY

SEQ ID NO: 341 - DNA, 54 bp, Artificial sequence
  primer: prm5539
ggggacaagtttgtacaaaaaagcaggcttaaacaatgagcagacccggagatt

SEQ ID NO: 342 - DNA, 51 bp, Artificial sequence
  primer: prm5540
ggggaccactttgtacaagaaagctgggtagacaaggctacttcaaaagca

SEQ ID NO: 343 - DNA, 2193 bp, Oryza sativa; identical to SEQ ID NO: 54

SEQ ID NO: 344 - protein, 3 aa, Artificial sequence
  sequence motif 1
  VARIANT (1)..(1): Xaa is Arg, Asp, Asn, or Gly
XDW

SEQ ID NO: 345 - protein, 3 aa, Artificial sequence
  sequence motif 2
GSW

SEQ ID NO: 346 - protein, 5 aa, Artificial sequence
  sequence motif 3
  VARIANT (3)..(3): Xaa is Cys, Ser, or Gln
  VARIANT (4)..(4): Xaa is Lys or Arg
NFXXR

SEQ ID NO: 347 - protein, 5 aa, Artificial sequence
  sequence motif 4
  VARIANT (2)..(2): Xaa is Tyr or Phe
  VARIANT (3)..(3): Xaa is Ser, Pro, or Ala
  VARIANT (4)..(4): Xaa is Ser, Phe, or Asn
NXXXR

SEQ ID NO: 348 - protein, 31 aa, Oryza sativa
  MISC_FEATURE (1)..(31): motif 1 - ATP-binding region of SIK polypeptide
VSESLTSTSYKASFRDDFTDPKTIEAIVSRL

SEQ ID NO: 349 - protein, 20 aa, Artificial sequence
  Zinc finger domain
  misc_feature (2)..(9): Xaa can be any amino acid
  misc_feature (11)..(15): Xaa can be any amino acid
  misc_feature (17)..(19): Xaa can be any amino acid
CXXXXXXXXCXXXXXCXXXH

SEQ ID NO: 350 - protein, 13 aa, Oryza sativa
  MISC_FEATURE (1)..(13): motif 2 - Serine threonine kinase active site signature
AMYNDFSTSNIQI

SEQ ID NO: 351 - protein, 32 aa, Chlamydomonas
MAMAMRSTFAARVGAKPAVRGARPASRMSCMA

SEQ ID NO: 352 - protein, 32 aa, Chlamydomonas
MQVTMKSSAVSGQRVGGARVATRSVRRAQLQV

SEQ ID NO: 353 - protein, 52 aa, Arabidopsis thaliana
MASLMLSLGSTSLLPREINKDKLKLGTSASNPFLKAKSFSRVTMTVAVKPSR

SEQ ID NO: 354 - protein, 54 aa, Arabidopsis thaliana
MATQFSASVSLQTSCLATTRISFQKPALISNHGKTNLSFNLRRSIPSRRLSVSC

SEQ ID NO: 355 - protein, 70 aa, Arabidopsis thaliana
MASIAASASISLQARPRQLAIAASQVKSFSNGRRSSLSFNLRQLPTRLTVSCAAKPETVDKVCAVVRKQL

SEQ ID NO: 356 - protein, 74 aa, Arabidopsis thaliana
MASIATSASTSLQARPRQLVIGAKQVKSFSYGSRSNLSFNLRQLPTRLTVYCAAKPETVDKVCAVVRKQLSLKE

SEQ ID NO: 357 - protein, 13 aa, Unknown
  Src-related peptide
RRLIEDAEYAARG

SEQ ID NO: 358 - protein, 13 aa, Artificial sequence
  Active site motif of cpFBPase
  misc_feature (1)..(1): Xaa is Ala or Gly
  misc_feature (2)..(2): Xaa is Arg or Lys
  misc_feature (3)..(3): Xaa is Leu or Ile
  misc_feature (4)..(4): Xaa is any amino acid
  misc_feature (5)..(5): Xaa is any amino acid or no amino acid
  misc_feature (6)..(6): Xaa is Leu, Ile, or Val
  misc_feature (7)..(7): Xaa is Phe or Tyr
  misc_feature (9)..(9): Xaa is any amino acid
  misc_feature (10)..(10): Xaa is any amino acid
  misc_feature (12)..(12): Xaa is Leu, Ile, Val, or Met
  misc_feature (13)..(13): Xaa is Gly, Ser, or Ala
XXXXXXXEXXPXX

SEQ ID NO: 359 - protein, 54 aa, Artificial sequence
  Ankyrin consensus sequence
  misc_feature (13)..(30): Xaa can be Asp or Glu
  misc_feature (45)..(50): Xaa can be Asp or Glu
NGHTALHIAASKXXXXXXXXXXXXXXXXXXGDEQCVKLLLEHGAXXXXXXDPNA

SEQ ID NO: 360 - protein, 39 aa, Artificial sequence
  C3H1 Zinc finger consensus sequence
  misc_feature (11)..(13): Xaa can be Asp or Glu
  misc_feature (18)..(24): Xaa can be Asp or Glu
  misc_feature (31)..(31): Xaa can be Asp or Glu
RYKTELCRTFXXXSESGXXXXXXXRCRYGAXKCQFAHGL

SEQ ID NO: 361 - protein, 95 aa, Unknown
  Brana_SYT2
MQQQQQQQQQPPQMFPMAPSMPPTNITTEQIQKYLEENKKLIMAIMENQNLGKLAECAQYQALLQKNLMYLAAIADAQPPPSTAGATPPPAMASQ

SEQ ID NO: 362 - protein, 341 aa, Unknown
  Arath cyFBPase
MDHAADAHRTDLMTITRFVLNEQSKYPESRGDFTILLSHIVLGCKFVCSAVNKAGLAKLIGLAGETNIQGEEQKKLDVLSNDVFVNALVSSGRTSVLVSEEDEEATFVEPSKRGKYCVVFDPLDGSSNIDCGVSIGTIFGIYTLDHTDEPTTADVLKPGNEMVAAGYCMYGSSCMLVLSTGTGVHGFTLDPSLGEFILTHPDIKIPNKGNIYSVNEGNAQNWDGPTTKYVEKCKFPKDGSPAKSLRYVGSMVADVHRTLLYGGIFLYPADKKSPNGKLRVLYEVFPMSFLMEQAGGQAFTGKKRALDLVPEKIHERSPIFLGSYDDVEEIKALYAEEEKKN

SEQ ID NO: 363 - protein, 317 aa, Unknown
  Euggr cyFBPase
MSSTGPAAHTMPSPSFQPASPLTPTVSSLNKAADSVTTSDFLTLQRYIMLTSKDQELAVLLSALSLACKATARACNKAGIALLFGLAGETNATGDDQKKLDVLSNDIFINSLTNCGACAVLVSEENEEPIIVDPAHAGRFCVAFTELVITFKNQGVHRFTLDPSLGEFIHTHDNVVFPEDGGKKIYSCNEGNSSNWDAAIKASVEYFKSGSKPYAARYVGSMVSDVHRTILYGGIYLYPADAKSKNGKLRVLYEGFPMAMIVEQAGGVASCGLFKGKIQRLLDLVPTSIHEKCPVILGGERDVQLVLNKYKELGLVE

SEQ ID NO: 364 - protein, 344 aa, Unknown
  Synec FBPaseII
MAQSTTSETHTRDLDRDCTTLSRHVLEQLQSFSPEAQDLAALMQRIGLAAKLIARRLSHAGLVDDALGFTGEINVQGEAVKRMDVYANQVFISVFRQSGLVCRLASEEMEKPYYIPENCPIGRYTLLYDPLDGSANVDVDLNVGSIFAVRRQEFYDESHEAKDLLQPGDRQIAAGYVLYGASTLLVYSMGQGVHVFVLDPSLGEFVLAQSDIQLPNSGQIYSVNEGNFWQWPEGYRQYIREMHRREAYSGRYSGALVADFHRILMQGGVFLYPETVKNPTGKLRLLYEAAPMAFLAEQAGGKASDGQKPILLRQPQALHERCPLIIGSAADVDFVEACLAESVP

SEQ ID NO: 365 - protein, 284 aa, Unknown
  glycina
MTVQKEDLGLSLSLSFPLLSSSPSSHNPQKPSWNDPIFTSSGEAGSFLRGIDVNRLPSVVDCEEEAGVSSPNSTVSSVSGKRSERETNGEENDTDRACSRGIISDEEDAETSRKKLRLSKDQSIVLEESFKEHNTLNPKQKLALAKQLGLRARQVEVWFQNRRARTKLKQTEVDCEFLKRCCENLTEENRRLQKEVQELRALKLSPQFYMHMTPPTTLTMCPSCERVAVPPSSAVDPATRHHHVPPSHPRAFPIGHGQALRCPPSQILDSRKQNDKIEKKDRKP

SEQ ID NO: 366 - protein, 136 aa, Unknown
  homeobox-leucine
KKLRLSKDQSIVLEESFKEHNTLNPKQKLALAKQLGLRARQVEVWFQNRRARTKLKQTEVDCEMTPPTTLTMCPSCERVAFPPPLPLILPRVTITCLHLTPGPFPLAHGQALRCPPSQILDSRKQNDKIEKKDRKP

SEQ ID NO: 367 - protein, 286 aa, Unknown
  Class II HD-Zip polypeptide:  Thom1
MSSEKEDGLGLSLSLGIMSCPQNNHKTTPSLPLNLLPFMHHHQVSSGRKDEGGERVRGGIDMNEPARMIIECDDEEDEEEDQVLMVSSPNSTVSSVSGKRSHDREENEGERATSSLEDDGGDAAARKKLRLSKEQAAVLEETFKEHNTLNPKQKLALSKQLNLRPRQVEVWFQNRRARTKLKQTEVDCEYLKRCCENLTDENRRLQKEVSELRALKLSPQFYMNMSPPTTLTMCPQCERVAVSSSSSSSSVVNATRAQNHQAPVPMNKPWAAMFASKTLDVQRSQM

SEQ ID NO: 368 - protein, 285 aa, Unknown
  craterostigma CPHB-3
AALLGLSLGSFGPSSSGGSHPPPALPLPSNLFRPSLQEIDRTQRSIGAFLQAPTAAAVCREPASAFRGIDVNRPPTIVDCGEENNNPIASPSPNSTVCSSSGKRTSGEREEKEDGDRAASSSFEVEDDDGGGGDASARKKLRLSKEQAVVLEETFKEHSTLNPKEKIALAKQLNLMPRQVEVWFQNRRARTKLKQTEVDCEYLRRCCENLTEENRRLQKEVNELRALKLSPQFYMSPPTTLTMCPQCERVAAQPSSAAAIRPPSHHQRPAAGMNSWAAMISPRPS

SEQ ID NO: 369 - protein, 279 aa, Unknown
  TaHDZipII-1 homeodomain-leucin
MMHRADGLDLGLGLGLGLASQGSITSSTTTAASSSPASASHSQHWTAALSSVIGLRKEEPGVQASTSPESGGTKRGLERTGSGLAAGSDEDDDGGDGTGGRKKLRLSKDQAAVLEECFKTHSTLNPKQKTALANRLGLRPRQVEVWFQNRRARTKLKQTEVDCEYMKRCCEQLAEQNRRLEKEVAELRALKAAPPAHSAAAAAGPLTTLTMCLSCKRVASTSSASACDVPNFSTNAGMGMPMPSPVALPDHRQFFCGYRDTGATYGGFSGLAKVVKPAR

SEQ ID NO: 370 - protein, 311 aa, Unknown
  ricehox1homeodomain-leucine
MEMMVHGRRDEQYGGLGLGLGLGLSLGVAGGAADDEQPPPRRGAAPPPQQQLCGWNGGGLFSSSSSDHRGRSAMMACHDVIEMPFLRGIDVNRAPAAETTTTTARGPSCSEEDEEPGASSPNSTLSSLSGKRGAPSAATAAAAAASDDEDSGGGSRKKLRLSKDQAAVLEDTFKEHNTLNPKQKAALARQLNLKPRQVEVWFQNRRARTKLKQTEVDCELLKRCCETLTDENRRLHRELQELRALKLATAAAAPHHLYGARVPPPTTLTMCPSCERVASAATTTRNNSGAAPARPVPTRPWPPAAAQRSSA

SEQ ID NO: 371 - protein, 311 aa, Unknown; identical to SEQ ID NO: 370
  Oshox1 homeodomain

SEQ ID NO: 372 - protein, 160 aa, Unknown
  Pphb4 homeodomain-leucine
MSSRGGSDDEDEGTTRKKLRLSKEQSALLEESFKEHSTLNPKQKNALAKQLGLRPRQVEVWFQNRRARTKLKQTEVDCELLKRCYESLKEENRRLQKELLELRAIKVAPPCVISHDYYMPLPAATLTMCPSCERVATVDNRSLTFAKPGFSHLSQSSAAC

SEQ ID NO: 373 - protein, 340 aa, Unknown
  Class II HD-Zip polypeptide:  Mshb1 type
MELGLSLGDSSKPLIGLMEKHPHQASKELGLGFNTTLSIGPIISTTQRDQLQQQQQEEEKTQRDINNNSNRTENPNPVLHQLDLLPQLSFPWNPPSQNGNLLSTEFGGSSRGLDVNVVPPATVVVMANDEMALSSSRIVQHLLFRRDLCMYSRGGSGGRSLSGSGGNKREFSDGEGYDQRNSSRVSDEDDNCGVGNGNTRKKLRLSKDQSAFLEESFKEHHTLNPKQKLALAKQLNLRPRQVEVWFQNRRARTKLKQTEVDCEYLKRCCETLTEENRRLHKELQELRALKTSNPFNMQLPATTLTMCPSCERVATNSTATSSVTNTSATINGNNNNKINQ

SEQ ID NO: 374 - protein, 278 aa, Unknown
  AT4G37790
MGLDDSCNTGLVLGLGLSPTPNNYNHAIKKSSSTVDHRFIRLDPSLTLSLSGESYKIKTGAGAGDQICRQTSSHSGISSFSSGRVKREREISGGDGEEEAEETTERVVCSRVSDDHDDEEGVSARKKLRLTKQQSALLEDNFKLHSTLNPKQKQALARQLNLRPRQVEVWFQNRRARTKLKQTEVDCEFLKKCCETLTDENRRLQKELQDLKALKLSQPFYMHMPAATLTMCPSCERLGGGGVGGDTTAVDEETAKGAFSIVTKPRFYNPFTNPSAAC

SEQ ID NO: 375 - protein, 274 aa, Unknown
  AT2G22800
MGFDDTCNTGLVLGLGPSPIPNNYNSTIRQSSVYKLEPSLTLCLSGDPSVTVVTGADQLCRQTSSHSGVSSFSSGRVVKRERDGGEESPEEEEMTERVISDYHEDEEGISARKKLRLTKQQSALLEESFKDHSTLNPKQKQVLARQLNLRPRQVEVWFQNRRARTKLKQTEVDCEFLKKCCETLADENIRLQKEIQELKTLKLTQPFYMHMPASTLTKCPSCERIGGGGGGNGGGGGGSGATAVIVDGSTAKGAFSISSKPHFFNPFTNPSAAC

SEQ ID NO: 376 - protein, 292 aa, Unknown; identical to SEQ ID NO: 236
  OJ1781E12.8 Hypothetical

SEQ ID NO: 377 - protein, 292 aa, Unknown
  RiceHox7 AAQ55491.1
MQKLTNATKQWQLHSQIVRFYLFLSIPLFVSSAETGSANSEMCTRGFDVNTRPADGGAEAGRPSSPSSMQEASTRQQVADQEAADDEDNGGGGARKKLRLSKEQSSFLEDSFKEHSTLTPKQKSDLANRLNLRPRQVEVWFQNRRARTKLKQTEVDCEHLKRCCERLTRENRRLQREVAELRGALRTTTSSYPPLYGLHHLPAAAGTVFRVCPSCEHSKVVAAAASESFSPRVFAGGGAPAAITAAAAVPSPGAGSPPSSSAALFGARRPHFGPFAAAVIPPVLRRQPSATS

SEQ ID NO: 378 - protein, 266 aa, Unknown
  Oshox7 homeodomain
PLFVSSAETGSANSEMCTRGFDVNTRPADGGAEAGRPSSPSSMQEASTRQQVADQEAADDEDNGGGGARKKLRLSKEQSSFLEDSFKEHSTLTPKQKSDLANRLNLRPRQVEVWFQNRRARTKLKQTEVDCEHLKRCCERLTRENRRLQREVAELRGALRTTTSSYPPLYGLHHLPAAAGTVFRVCPSCEHSKVVAAAASESFSPRVFAGGGAPAAITAAAAVPSPGAGSPPSSSAALFGARRPHFGPFAAAVIPPVLRRQPSATS

SEQ ID NO: 379 - protein, 264 aa, Unknown
  P0020C11.33 putative
MELELSLGSANSEMCTRGFDVNTRPADGGAEAGRPSSPSSMQEASTRQQVADQEAADDEDNGGGGARKKLRLSKEQSSFLEDSFKEHSTLTPKQKSDLANRLNLRPRQVEVWFQNRRARTKLKQTEVDCEHLKRCCERLTRENRRLQREVAELRGTLRTTTSSYPPLYGLHHLPAAAGTVFRVCPSCEHSKVVAAAASESFSPRVFAGGGAPAAITAAAAVPSPGAGSPPSSSAALFGARRPHFGPFAAAVIPPVLRRQPSATS

SEQ ID NO: 380 - protein, 274 aa, Unknown
  AT2G01430
MIKLLFTYICTYTYKLYALYHMDYACVCMYKYKGIVTLQVCLFYIKLRVFLSNFTFSSSILALKNPNNSLIKIMAILPENSSNLDLTISVPGFSSSPLSDEGSGGGRDQLRLDMNRLPSSEDGDDEEFSHDDGSAPPRKKLRLTREQSRLLEDSFRQNHTLNPKQKEVLAKHLMLRPRQIEVWFQNRRARSKLKQTEMECEYLKRWFGSLTEENHRLHREVEELRAMKVGPTVNSASSLTMCPRCERVTPAASPSRAVVPVPAKKTFPPQERDR

SEQ ID NO: 381 - protein, 206 aa, Unknown
  AT1G70920
MALSPNSSSLDLTISIPSFSPSPSLGDHHGMRDFDINQTPKTEEDREWMIGATPHVNEDDSNSGGRRRKKLRLTKEQSHLLEESFIQNHTLTPKQKKDLATFLKLSQRQVEVWFQNRRARSKLKHTEMECEYLKRWFGSLKEQNRRLQIEVEELRALKPSSTSALTMCPRCERVTDAVDNDSNAVQEGAVLSSRSRMTISSSSSLC

SEQ ID NO: 382 - protein, 316 aa, Unknown
  riceP0510C12.22 putative
MITAAVPRADRPARLPPNRGTCRQSSCTRPCAPTRGVPTVTPPPASAARPSIPTHQSTIARLAVTGCGGCASATERVRRGDWPGPAREKPASDVTGLELTMAVPGLSSSGSEGAGCNNNNAGGGCNMRDLDINQPASGGEEEEFPMGSVEEDEEERGVGGPHRPKKLRLSKEQSRLLEESFRLNHTLTPKQKEALAIKLKLRPRQVEVWFQNRRARTKLKQTEMECEYLKRCFGSLTEENRRLQREVEELRAMRVAPPTVLSPHTRQPLPASALTMCPRCERITAATGPPAVRPPPSSAAAAAPSPFHPRRPSAAF

SEQ ID NO: 383 - protein, 89 aa, Unknown
  HDZip protein ATHB1
LPEKKRRLTTEQVHLLEKSFETENKLEPERKTQLAKKLGLQPRQVAVWFQNRRARWKTKQLERDYDLLKSTYDQLLSNYDSIVMDNDKL

SEQ ID NO: 384 - protein, 89 aa, Unknown
  HDZip protein ATHB3
LGEKKKRLNLEQVRALEKSFELGNKLEPERKMQLAKALGLQPRQIAIWFQNRRARWKTKQLERDYDSLKKQFDVLKSDNDSLLAHNKKL

SEQ ID NO: 385 - protein, 89 aa, Unknown
  HDZip protein ATHB20
LGEKKKRLQLEQVKALEKSFELGNKLEPERKIQLAKALGMQPRQIAIWFQNRRARWKTRQLERDYDSLKKQFESLKSDNASLLAYNKKL

SEQ ID NO: 386 - protein, 89 aa, Unknown
  HDZip protein ATHB13
MGEKKRRLNMEQVKTLEKNFELGNKLEPERKMQLARALGLQPRQIAIWFQNRRARWKTKQLEKDYDTLKRQFDTLKAENDLLQTHNQKL

SEQ ID NO: 387 - protein, 89 aa, Unknown
  HDZip protein ATHB23
MGEKKRRLNMEQLKALEKDFELGNKLESDRKLELARALGLQPRQIAIWFQNRRARSKTKQLEKDYDMLKRQFESLRDENEVLQTQNQKL

SEQ ID NO: 388 - protein, 89 aa, Unknown
  HDZip protein ATHB5
AAEKKRRLGVEQVKALEKNFEIDNKLEPERKVKLAQELGLQPRQVAIWFQNRRARWKTKQLERDYGVLKSNFDALKRNRDSLQRDNDSL

SEQ ID NO: 389 - protein, 89 aa, Unknown
  HDZip protein ATHB6
LSEKKRRLSINQVKALEKNFELENKLEPERKVKLAQELGLQPRQVAVWFQNRRARWKTKQLEKDYGVLKTQYDSLRHNFDSLRRDNESL

SEQ ID NO: 390 - protein, 89 aa, Unknown
  HDZip protein ATHB16
LSEKKRRLKVDQVKALEKNFELENKLEPERKTKLAQELGLQPRQVAVWFQNRRARWKTKQLEKDYGVLKGQYDSLRHNFDSLRRDNDSL

SEQ ID NO: 391 - protein, 89 aa, Unknown
  HDZip protein ATHB7
NKNNQRRFSDEQIKSLEMMFESETRLEPRKKVQLARELGLQPRQVAIWFQNKRARWKSKQLETEYNILRQNYDNLASQFESLKKEKQAL

SEQ ID NO: 392 - protein, 89 aa, Unknown
  HDZip protein ATHB12
KSNNQKRFSEEQIKSLELIFESETRLEPRKKVQVARELGLQPRQVAIWFQNKRARWKTKQLEKEYNTLRANYNNLASQFEIMKKEKQSL

SEQ ID NO: 393 - protein, 89 aa, Unknown
  HDZip protein ATHB40
GLFRKRKLTDEQVNMLEMSFGDEHKLESERKDRLAAELGLDPRQVAVWFQNRRARWKNKRLEEEYNKLKNSHDNVVVDKCRLESEVIQL

SEQ ID NO: 394 - protein, 89 aa, Unknown
  HDZip protein ATHB21
GWFRKRKLSDEQVRMLEISFEDDHKLESERKDRLASELGLDPRQVAVWFQNRRARWKNKRVEDEYTKLKNAYETTVVEKCRLDSEVIHL

SEQ ID NO: 395 - protein, 89 aa, Unknown
  HDZip protein ATHB53
GMLRKRKLTDEQVNMLEYSFGNEHKLESGRKEKIAGELGLDPRQVAVWFQNRRARWKNKKLEEEYAKLKNHHDNVVLGQCQLESQILKL

SEQ ID NO: 396 - protein, 89 aa, Unknown
  HDZip protein ATHB51
EMIKKKRLTSGQLASLERSFQEEIKLDSDRKVKLSRELGLQPRQIAVWFQNRRARWKAKQLEQLYDSLRQEYDVVSREKQMLHDEVKKL

SEQ ID NO: 397 - protein, 97 aa, Unknown
  HDZip protein ATHB22
QEKKKKKMTSEQLKFLERSFQEEIKLNPDRKMKLNPDRKMKLSKELGLQPRQIAVWFQNRKARWKNKQLEHLYESLRQEFDIVSREKELLQEELIQL

SEQ ID NO: 398 - protein, 89 aa, Unknown
  HDZip protein ATHB54
EITKKRKLTPIQLRLLEESFEEEKRLEPDRKLWLAEKLGLQPSQVAVWFQNRRARYKTKQLEHDCDSLKASYAKLKTDWDILFVQNQTL

SEQ ID NO: 399 - protein, 89 aa, Unknown
  HDZip protein ATHB52
GKNKKKRLTQDQVRQLEKCFTMNKKLEPDLKLQLSNQLGLPQRQVAVWFQNKRARFKTQSLEVQHCTLQSKHEAALSDKAKLEHQVQFL

SEQ ID NO: 400 - protein, 89 aa, Unknown
  HDZip protein ATHB17
PPRKKLRLTREQSRLLEDSFRQNHTLNPKQKEVLAKHLMLRPRQIEVWFQNRRARSKLKQTEMECEYLKRWFGSLTEENHRLHREVEEL

SEQ ID NO: 401 - protein, 89 aa, Unknown
  HDZip protein HAT2
TSRKKLRLSKDQSAFLEETFKEHNTLNPKQKLALAKKLNLTARQVEVWFQNRRARTKLKQTEVDCEYLKRCVEKLTEENRRLQKEAMEL

SEQ ID NO: 402 - protein, 89 aa, Unknown
  HDZip protein HAT1
TCRKKLRLSKDQSAVLEDTFKEHNTLNPKQKLALAKKLGLTARQVEVWFQNRRARTKLKQTEVDCEYLKRCVEKLTEENRRLEKEAAEL

SEQ ID NO: 403 - protein, 89 aa, Unknown
  HDZip protein HAT14
STRKKLRLSKDQSAFLEDSFKEHSTLNPKQKIALAKQLNLRPRQVEVWFQNRRARTKLKQTEVDCEYLKRCCESLTEENRRLQKEVKEL

SEQ ID NO: 404 - protein, 89 aa, Unknown
  HDZip protein ATHB4
GSRKKLRRLSDQALVLEETFKEHSTLNPKQKLALAKQLNLRARQVEVWFQNRRARTKLKQTEVDCEYLKRCCDNLTEENRRLQKEVSEL

SEQ ID NO: 405 - protein, 89 aa, Unknown
  HDZip protein HAT3
SSRKKLRLSKEQALVLEETFKEHSTLNPKQKMALAKQLNLRTRQVEVWFQNRRARTKLKQTEVDCEYLKRCCENLTDENRRLQKEVSEL

SEQ ID NO: 406 - protein, 89 aa, Unknown
  HDZip protein ATHB2
NSRKKLRLSKDQALVLEETFKDHSTLNPKQKQALAKQLGLRARQVEVWFQNRRARTKLKQTEVDCEFLRRCCENLTEENRRLQKEVTEL

SEQ ID NO: 407 - protein, 89 aa, Unknown
  HDZip protein HAT22
SARKKLRLTKQQSALLEDNFKLHSTLNPKQKQALARQLNLRPRQVEVWFQNRRARTKLKQTEVDCEFLKKCCETLTDENRRLQKELQDL

SEQ ID NO: 408 - protein, 89 aa, Unknown
  HDZip protein HAT9
SARKKLRLTKQQSALLEESFKDHSTLNPKQKQVLARQLNLRPRQVEVWFQNRRARTKLKQTEVDCEFLKKCCETLADENIRLQKEIQEL

SEQ ID NO: 409 - protein, 193 aa, Unknown
  SYB1 protein:  BG450099_1
  misc_feature (171)..(171): Xaa can be any naturally occurring amino acid
  misc_feature (181)..(181): Xaa can be any naturally occurring amino acid
  misc_feature (185)..(185): Xaa can be any naturally occurring amino acid
  misc_feature (189)..(189): Xaa can be any naturally occurring amino acid
  misc_feature (192)..(192): Xaa can be any naturally occurring amino acid
MSRPGDWNCRTCNHLNFQRRESCQRCGESRMTSGCGAVDFGGSFLGGRGSSSPFPFTTGPDVRPGDWYCTVGNCGAHNFASRSSCFKCGAPKDIDTFSSDSSDMPRLLRSPYGFGAGSAGGGASTRPGWKSGDWICTRSGCNEHNFANRMECYRCNGPRDSSTGRSSYLSXTFSIWFDVQXEIIXRGYXISXR

SEQ ID NO: 410 - protein, 155 aa, Unknown; identical to SEQ ID NO: 320
  Accession No. DT457997_1

SEQ ID NO: 411 - protein, 169 aa, Unknown; identical to SEQ ID NO: 322
  Accession No. DW105125_1

SEQ ID NO: 412 - protein, 52 aa, Artificial sequence
  Consensus sequence
  misc_feature (1)..(1): Xaa can be an Ala, Cys, Asp, Glu, Gly, His, Lys, Asn, Gln, Arg, Ser or Thr
  misc_feature (2)..(2): Xaa can be any naturally occurring amino acid
  misc_feature (3)..(4): Xaa can be an Ala, Cys, Asp, Gly, Asn, Pro, Ser, Thr or Val
  misc_feature (5)..(5): Xaa can be an Ile, Leu or Val
  misc_feature (6)..(7): Xaa can be an Ala, Cys, Phe, Gly, His, Ile, Lys, Leu, Met, Arg, Thr, Val, Trp or Tyr
  misc_feature (8)..(8): Xaa can be an Ala, Cys, Asp, Gly, Asn, Pro, Ser, Thr or Val
  misc_feature (9)..(9): Xaa can be an Ala, Cys, Phe, Gly, His, Ile, Lys, Leu, Met, Arg, Thr, Val, Trp or Tyr
  misc_feature (10)..(10): Xaa can be any naturally occurring amino acid
  misc_feature (11)..(11): Xaa can be an Ala, Cys, Asp, Glu, Gly, His, Lys, Asn, Gln, Arg, Ser or Thr
  misc_feature (12)..(29): Xaa can be any naturally occurring amino acid
  misc_feature (30)..(30): Xaa can be an Ala, Cys, Asp, Glu, Gly, His, Lys, Asn, Gln, Arg, Ser or Thr
  misc_feature (31)..(31): Xaa can be a Cys, Asp, Glu, His, Lys, Asn, Gln, Arg, Ser or Thr
  misc_feature (32)..(32): Xaa can be any naturally occurring amino acid
  misc_feature (33)..(33): Xaa can be a Cys, Asp, Glu, His, Lys, Asn, Gln, Arg, Ser or Thr
  misc_feature (34)..(35): Xaa can be an Ala, Cys, Phe, Gly, His, Ile, Lys, Leu, Met, Arg, Thr, Val, Trp or Tyr
  misc_feature (36)..(36): Xaa can be a Cys, Asp, Glu, His, Lys, Asn, Gln, Arg, Ser or Thr
  misc_feature (37)..(37): Xaa can be an Ala, Cys, Phe, Gly, His, Ile, Lys, Leu, Met, Arg, Thr, Val, Trp or Tyr
  misc_feature (38)..(39): Xaa can be an Ile, Leu or Val
  misc_feature (40)..(40): Xaa can be a Cys, Asp, Glu, His, Lys, Asn, Gln, Arg, Ser or Thr
  misc_feature (41)..(41): Xaa can be any naturally occurring amino acid
  misc_feature (42)..(42): Xaa can be an Ala, Cys, Asp, Glu, Gly, His, Lys, Asn, Gln, Arg, Ser or Thr
  misc_feature (43)..(49): Xaa can be any naturally occurring amino acid
  misc_feature (50)..(50): Xaa can be a Cys, Asp, Glu, His, Lys, Asn, Gln, Arg, Ser or Thr
  misc_feature (51)..(51): Xaa can be an Ala, Cys, Phe, Gly, His, Ile, Lys, Leu, Met, Arg, Thr, Val, Trp or Tyr
  misc_feature (52)..(52): Xaa can be an Ala, Cys, Asp, Glu, Gly, His, Lys, Asn, Gln, Arg, Ser or Thr
XXXXXXXXXXXXXXXXXXXXXXXXXXXXXXXXXXXXXXXXXXXXXXXXXXXX

SEQ ID NO: 413 - protein, 37 aa, Artificial sequence
  Consensus sequence
  misc_feature (1)..(1): Xaa can be an Ala, Cys, Asp, Glu, Gly, His, Lys, Asn, Gln, Arg, Ser or Thr
  misc_feature (2)..(2): Xaa can be any naturally occurring amino acid
  misc_feature (3)..(3): Xaa can be a Cys, Asp, Glu, His, Lys, Asn, Gln, Arg, Ser or Thr
  misc_feature (4)..(6): Xaa can be any naturally occurring amino acid
  misc_feature (8)..(9): Xaa can be any naturally occurring amino acid
  misc_feature (10)..(10): Xaa can be a Phe, His, Trp or Tyr
  misc_feature (11)..(15): Xaa can be any naturally occurring amino acid
  misc_feature (16)..(16): Xaa can be an Ala, Cys, Asp, Glu, Gly, His, Lys, Asn, Gln, Arg, Ser or Thr
  misc_feature (18)..(25): Xaa can be any naturally occurring amino acid
  misc_feature (27)..(27): Xaa can be any naturally occurring amino acid
  misc_feature (28)..(28): Xaa can be an Ala, Cys, Phe, Gly, His, Ile, Lys, Leu, Met, Arg, Thr, Val, Trp or Tyr
  misc_feature (29)..(29): Xaa can be an Ala, Gly or Ser
  misc_feature (30)..(31): Xaa can be any naturally occurring amino acid
  misc_feature (32)..(32): Xaa can be a Cys, Asp, Glu, His, Lys, Asn, Gln, Arg, Ser or Thr
  misc_feature (34)..(34): Xaa can be any naturally occurring amino acid
  misc_feature (35)..(35): Xaa can be a Phe, His, Trp or Tyr
  misc_feature (36)..(36): Xaa can be any naturally occurring amino acid
XXXXXXCXXXXXXXXXGXXXXXXXXCXXXXXXCXXXH

SEQ ID NO: 414 - protein, 54 aa, Artificial sequence
  Consensus sequence
  misc_feature (1)..(1): Xaa can be a Cys, Asp, Glu, His, Lys, Asn, Gln, Arg, Ser or Thr
  misc_feature (2)..(2): Xaa can be an Ala, Cys, Asp, Gly, Asn, Pro, Ser, Thr or Val
  misc_feature (3)..(3): Xaa can be an Ala, Cys, Asp, Glu, Gly, His, Lys, Asn, Gln, Arg, Ser or Thr
  misc_feature (4)..(4): Xaa can be a Ser or Thr
  misc_feature (5)..(5): Xaa can be an Ala, Cys, Asp, Gly, Asn, Pro, Ser, Thr or Val
  misc_feature (7)..(7): Xaa can be a Cys, Asp, Glu, His, Lys, Asn, Gln, Arg, Ser or Thr
  misc_feature (8)..(8): Xaa can be an Ala, Cys, Phe, Gly, His, Ile, Lys, Leu, Met, Arg, Thr, Val, Trp or Tyr
  misc_feature (10)..(10): Xaa can be an Ala, Cys, Asp, Gly, Asn, Pro, Ser, Thr or Val
  misc_feature (11)..(11): Xaa can be an Ala, Cys, Asp, Glu, Gly, His, Lys, Asn, Gln, Arg, Ser or Thr
  misc_feature (12)..(12): Xaa can be a Cys, Asp, Glu, His, Lys, Asn, Gln, Arg, Ser or Thr
  misc_feature (13)..(30): Xaa can be any naturally occurring amino acid
  misc_feature (31)..(31): Xaa can be an Ala, Cys, Asp, Gly, Asn, Pro, Ser, Thr or Val
  misc_feature (32)..(32): Xaa can be a Cys, Asp, Glu, His, Lys, Asn, Gln, Arg, Ser or Thr
  misc_feature (33)..(33): Xaa can be an Ala, Cys, Phe, Gly, His, Ile, Lys, Leu, Met, Arg, Thr, Val, Trp or Tyr
  misc_feature (34)..(34): Xaa can be a Cys, Asp, Glu, His, Lys, Asn, Gln, Arg, Ser or Thr
  misc_feature (35)..(35): Xaa can be an Ala, Cys, Phe, Gly, His, Ile, Lys, Leu, Met, Arg, Thr, Val, Trp or Tyr
  misc_feature (36)..(36): Xaa can be an Ile, Leu or Val
  misc_feature (37)..(37): Xaa can be a Cys, Asp, Glu, His, Lys, Asn, Gln, Arg, Ser or Thr
  misc_feature (38)..(38): Xaa can be an Ala, Cys, Phe, Gly, His, Ile, Lys, Leu, Met, Arg, Thr, Val, Trp or Tyr
  misc_feature (40)..(40): Xaa can be an Ile, Leu or Val
  misc_feature (41)..(41): Xaa can be a Cys, Asp, Glu, His, Lys, Asn, Gln, Arg, Ser or Thr
  misc_feature (42)..(42): Xaa can be an Ala, Cys, Asp, Glu, Gly, His, Lys, Asn, Gln, Arg, Ser or Thr
  misc_feature (43)..(44): Xaa can be an Ala, Cys, Asp, Gly, Asn, Pro, Ser, Thr or Val
  misc_feature (45)..(50): Xaa can be any naturally occurring amino acid
  misc_feature (51)..(51): Xaa can be an Ala, Cys, Asp, Gly, Asn, Pro, Ser, Thr or Val
  misc_feature (52)..(52): Xaa can be an Ala, Cys, Phe, Gly, His, Ile, Lys, Leu, Met, Arg, Thr, Val, Trp or Tyr
  misc_feature (53)..(53): Xaa can be an Ala, Cys, Asp, Gly, Asn, Pro, Ser, Thr or Val
  misc_feature (54)..(54): Xaa can be an Ala, Cys, Phe, Gly, His, Ile, Lys, Leu, Met, Arg, Thr, Val, Trp or Tyr
XXXXXKXXAXXXXXXXXXXXXXXXXXXXXXXXXXXXXXLXXXXXXXXXXXXXXX

SEQ ID NO: 415 - protein, 38 aa, Artificial sequence
  Consensus sequence
  misc_feature (1)..(1): Xaa can be a Cys, Asp, Glu, His, Lys, Asn, Gln, Arg, Ser or Thr
  misc_feature (2)..(2): Xaa can be any naturally occurring amino acid
  misc_feature (3)..(3): Xaa can be a His, Lys or Arg
  misc_feature (4)..(5): Xaa can be any naturally occurring amino acid
  misc_feature (6)..(6): Xaa can be an Ala, Cys, Phe, Gly, His, Ile, Lys, Leu, Met, Arg, Thr, Val, Trp or Tyr
  misc_feature (8)..(8): Xaa can be a Cys, Asp, Glu, His, Lys, Asn, Gln, Arg, Ser or Thr
  misc_feature (9)..(9): Xaa can be an Ala, Cys, Phe, Gly, His, Ile, Lys, Leu, Met, Arg, Thr, Val, Trp or Tyr
  misc_feature (10)..(10): Xaa can be a Phe, His, Trp or Tyr
  misc_feature (11)..(14): Xaa can be any naturally occurring amino acid
  misc_feature (15)..(15): Xaa can be an Ala, Cys, Asp, Glu, Gly, His, Lys, Asn, Gln, Arg, Ser or Thr
  misc_feature (16)..(16): Xaa can be a Cys, Asp, Glu, His, Lys, Asn, Gln, Arg, Ser or Thr
  misc_feature (18)..(24): Xaa can be any naturally occurring amino acid
  misc_feature (25)..(25): Xaa can be an Ala, Cys, Phe, Gly, His, Ile, Lys, Leu, Met, Arg, Thr, Val, Trp or Tyr
  misc_feature (27)..(27): Xaa can be an Ala, Cys, Asp, Glu, Gly, His, Lys, Asn, Gln, Arg, Ser or Thr
  misc_feature (28)..(28): Xaa can be an Ala, Cys, Phe, Gly, His, Ile, Lys, Leu, Met, Arg, Thr, Val, Trp or Tyr
  misc_feature (30)..(30): Xaa can be an Ala, Cys, Asp, Gly, Asn, Pro, Ser, Thr or Val
  misc_feature (31)..(31): Xaa can be any naturally occurring amino acid
  misc_feature (32)..(32): Xaa can be a Cys, Asp, Glu, His, Lys, Asn, Gln, Arg, Ser or Thr
  misc_feature (34)..(34): Xaa can be a Cys, Asp, Glu, His, Lys, Asn, Gln, Arg, Ser or Thr
  misc_feature (35)..(35): Xaa can be a Phe, His, Trp or Tyr
  misc_feature (36)..(36): Xaa can be an Ala, Cys, Phe, Gly, His, Ile, Lys, Leu, Met, Arg, Thr, Val, Trp or Tyr
  misc_feature (38)..(38): Xaa can be an Ala, Cys, Asp, Gly, Asn, Pro, Ser, Thr or Val
XXXXXXCXXXXXXXXXGXXXXXXXXCXXGXXXCXXXHX

SEQ ID NO: 416 - protein, 54 aa, Artificial sequence
  Consensus Sequence
  misc_feature (1)..(1): Xaa can be an Ala, Cys, Asp, Gly, Asn, Pro, Ser, Thr or Val
  misc_feature (3)..(3): Xaa can be a Cys, Asp, Glu, His, Lys, Asn, Gln, Arg, Ser or Thr
  misc_feature (5)..(5): Xaa can be an Ala, Cys, Asp, Gly, Asn, Pro, Ser, Thr or Val
  misc_feature (8)..(8): Xaa can be an Ala, Cys, Phe, Gly, His, Ile, Lys, Leu, Met, Arg, Thr, Val, Trp or Tyr
  misc_feature (10)..(10): Xaa can be an Ala, Cys, Asp, Gly, Asn, Pro, Ser, Thr or Val
  misc_feature (11)..(11): Xaa can be a Cys, Asp, Glu, His, Lys, Asn, Gln, Arg, Ser or Thr
  misc_feature (12)..(12): Xaa can be an Ala, Cys, Asp, Gly, Asn, Pro, Ser, Thr or Val
  misc_feature (13)..(30): Xaa can be any naturally occurring amino acid
  misc_feature (31)..(32): Xaa can be an Ala, Cys, Asp, Gly, Asn, Pro, Ser, Thr or Val
  misc_feature (33)..(33): Xaa can be an Ala, Cys, Phe, Gly, His, Ile, Lys, Leu, Met, Arg, Thr, Val, Trp or Tyr
  misc_feature (34)..(34): Xaa can be an Asp, Glu, His, Lys or Arg
  misc_feature (35)..(36): Xaa can be an Ile, Leu or Val
  misc_feature (37)..(37): Xaa can be an Asp, Glu, His, Lys or Arg
  misc_feature (38)..(38): Xaa can be an Ala, Cys, Phe, Gly, His, Ile, Lys, Leu, Met, Arg, Thr, Val, Trp or Tyr
  misc_feature (40)..(40): Xaa can be an Ile, Leu or Val
  misc_feature (41)..(41): Xaa can be an Ala, Cys, Asp, Gly, Asn, Pro, Ser, Thr or Val
  misc_feature (42)..(42): Xaa can be a Cys, Asp, Glu, His, Lys, Asn, Gln, Arg, Ser or Thr
  misc_feature (43)..(43): Xaa can be an Ala, Gly or Ser
  misc_feature (44)..(44): Xaa can be an Ala, Cys, Asp, Gly, Asn, Pro, Ser, Thr or Val
  misc_feature (45)..(50): Xaa can be any naturally occurring amino acid
  misc_feature (51)..(51): Xaa can be an Ala, Cys, Asp, Gly, Asn, Pro, Ser, Thr or Val
  misc_feature (52)..(52): Xaa can be an Ile, Leu or Val
  misc_feature (53)..(53): Xaa can be an Ala, Cys, Asp, Gly, Asn, Pro, Ser, Thr or Val
  misc_feature (54)..(54): Xaa can be an Ala, Cys, Asp, Glu, Gly, His, Lys, Asn, Gln, Arg, Ser or Thr
XGXTXLHXAXXXXXXXXXXXXXXXXXXXXXXXXXXXXXLXXXXXXXXXXXXXXX

SEQ ID NO: 417 - protein, 39 aa, Artificial sequence
  Consensus Sequence
  misc_feature (1)..(1): Xaa can be a Cys, Asp, Glu, His, Lys, Asn, Gln, Arg, Ser or Thr
  misc_feature (2)..(2): Xaa can be an Ala, Cys, Phe, Gly, His, Ile, Lys, Leu, Met, Arg, Thr, Val, Trp or Tyr
  misc_feature (3)..(3): Xaa can be a His, Lys or Arg
  misc_feature (4)..(4): Xaa can be any naturally occurring amino acid
  misc_feature (5)..(5): Xaa can be an Ala, Cys, Asp, Gly, Asn, Pro, Ser, Thr or Val
  misc_feature (6)..(6): Xaa can be an Ile, Leu or Val
  misc_feature (8)..(8): Xaa can be an Asp, Glu, His, Lys or Arg
  misc_feature (9)..(9): Xaa can be an Ala, Cys, Asp, Glu, Gly, His, Lys, Asn, Gln, Arg, Ser or Thr
  misc_feature (11)..(14): Xaa can be any naturally occurring amino acid
  misc_feature (15)..(16): Xaa can be a Cys, Asp, Glu, His, Lys, Asn, Gln, Arg, Ser or Thr
  misc_feature (18)..(24): Xaa can be any naturally occurring amino acid
  misc_feature (25)..(25): Xaa can be a Cys, Asp, Glu, His, Lys, Asn, Gln, Arg, Ser or Thr
  misc_feature (27)..(27): Xaa can be an Ala, Cys, Asp, Gly, Asn, Pro, Ser, Thr or Val
  misc_feature (28)..(28): Xaa can be an Ala, Cys, Phe, Gly, His, Ile, Lys, Leu, Met, Arg, Thr, Val, Trp or Tyr
  misc_feature (30)..(30): Xaa can be an Ala, Cys, Asp, Gly, Asn, Pro, Ser, Thr or Val
  misc_feature (31)..(31): Xaa can be any naturally occurring amino acid
  misc_feature (32)..(32): Xaa can be a Cys, Asp, Glu, His, Lys, Asn, Gln, Arg, Ser or Thr
  misc_feature (34)..(34): Xaa can be a Cys, Asp, Glu, His, Lys, Asn, Gln, Arg, Ser or Thr
  misc_feature (36)..(36): Xaa can be an Ala, Cys, Asp, Glu, Gly, His, Lys, Asn, Gln, Arg, Ser or Thr
  misc_feature (38)..(38): Xaa can be an Ala, Cys, Asp, Gly, Asn, Pro, Ser, Thr or Val
  misc_feature (39)..(39): Xaa can be an Ala, Cys, Asp, Glu, Gly, His, Lys, Asn, Gln, Arg, Ser or Thr
XXXXXXCXXFXXXXXXGXXXXXXXXCXXGXXXCXFXHXX

SEQ ID NO: 418 - protein, 88 aa, Artificial sequence
  Consensus sequence
  misc_feature (3)..(3): Xaa can be any naturally occurring amino acid
  misc_feature (7)..(7): Xaa can be any naturally occurring amino acid
  misc_feature (9)..(12): Xaa can be any naturally occurring amino acid
  misc_feature (18)..(18): Xaa can be any naturally occurring amino acid
  misc_feature (20)..(22): Xaa can be any naturally occurring amino acid
  misc_feature (37)..(37): Xaa can be any naturally occurring amino acid
  misc_feature (60)..(60): Xaa can be any naturally occurring amino acid
  misc_feature (78)..(87): Xaa can be any naturally occurring amino acid
QQXMQMXPXXXXMMAAYXPXXXITTEQIQKYLDENKXLILAILENQNLGKLAECAQYQAXLQKNLMYLAAIADAQPQXXXXXXXXXXP

SEQ ID NO: 419 - protein, 314 aa, Artificial sequence
  Consensus sequence
  misc_feature (3)..(3): Xaa can be any naturally occurring amino acid
  misc_feature (7)..(7): Xaa can be any naturally occurring amino acid
  misc_feature (9)..(12): Xaa can be any naturally occurring amino acid
  misc_feature (18)..(18): Xaa can be any naturally occurring amino acid
  misc_feature (20)..(22): Xaa can be any naturally occurring amino acid
  misc_feature (37)..(37): Xaa can be any naturally occurring amino acid
  misc_feature (60)..(60): Xaa can be any naturally occurring amino acid
  misc_feature (78)..(87): Xaa can be any naturally occurring amino acid
  misc_feature (89)..(92): Xaa can be any naturally occurring amino acid
  misc_feature (95)..(97): Xaa can be any naturally occurring amino acid
  misc_feature (99)..(102): Xaa can be any naturally occurring amino acid
  misc_feature (104)..(106): Xaa can be any naturally occurring amino acid
  misc_feature (108)..(112): Xaa can be any naturally occurring amino acid
  misc_feature (117)..(117): Xaa can be any naturally occurring amino acid
  misc_feature (121)..(142): Xaa can be any naturally occurring amino acid
  misc_feature (151)..(151): Xaa can be any naturally occurring amino acid
  misc_feature (153)..(161): Xaa can be any naturally occurring amino acid
  misc_feature (165)..(178): Xaa can be any naturally occurring amino acid
  misc_feature (180)..(180): Xaa can be any naturally occurring amino acid
  misc_feature (183)..(187): Xaa can be any naturally occurring amino acid
  misc_feature (189)..(190): Xaa can be any naturally occurring amino acid
  misc_feature (199)..(200): Xaa can be any naturally occurring amino acid
  misc_feature (203)..(216): Xaa can be any naturally occurring amino acid
  misc_feature (219)..(220): Xaa can be any naturally occurring amino acid
  misc_feature (222)..(225): Xaa can be any naturally occurring amino acid
  misc_feature (227)..(240): Xaa can be any naturally occurring amino acid
  misc_feature (242)..(246): Xaa can be any naturally occurring amino acid
  misc_feature (250)..(255): Xaa can be any naturally occurring amino acid
  misc_feature (257)..(286): Xaa can be any naturally occurring amino acid
  misc_feature (288)..(288): Xaa can be any naturally occurring amino acid
  misc_feature (290)..(299): Xaa can be any naturally occurring amino acid
  misc_feature (302)..(304): Xaa can be any naturally occurring amino acid
  misc_feature (306)..(307): Xaa can be any naturally occurring amino acid
  misc_feature (309)..(310): Xaa can be any naturally occurring amino acid
QQXMQMXPXXXXMMAAYXPXXXITTEQIQKYLDENKXLILAILENQNLGKLAECAQYQAXLQKNLMYLAAIADAQPQXXXXXXXXXXPXXXXQMXXXGXXXXMXXXGXXXXXYYMQXPQAXXXXXXXXXXXXXXXXXXXXXXMTPQQLQEXQXXXXXXXXXQQQXXXXXXXXXXXXXXQXQQXXXXXAXXGQMGMRPGXXNGXXXXXXXXXXXXXXMLXXEXXXXGXXXXXXXXXXXXXXGXXXXXGRGXXXXXXGXXXXXXXXXXXXXXXXXXXXXXXXXXXXXXGXGXXXXXXXXXXTGXXXYXXGXXAEDG

SEQ ID NO: 420 - protein, 445 aa, Artificial sequence
  Consensus sequence
  misc_feature (2)..(53): Xaa can be any naturally occurring amino acid
  misc_feature (56)..(56): Xaa can be any naturally occurring amino acid
  misc_feature (60)..(76): Xaa can be any naturally occurring amino acid
  misc_feature (78)..(78): Xaa can be any naturally occurring amino acid
  misc_feature (82)..(82): Xaa can be any naturally occurring amino acid
  misc_feature (86)..(86): Xaa can be any naturally occurring amino acid
  misc_feature (90)..(90): Xaa can be any naturally occurring amino acid
  misc_feature (93)..(96): Xaa can be any naturally occurring amino acid
  misc_feature (98)..(98): Xaa can be any naturally occurring amino acid
  misc_feature (125)..(127): Xaa can be any naturally occurring amino acid
  misc_feature (188)..(197): Xaa can be any naturally occurring amino acid
  misc_feature (226)..(226): Xaa can be any naturally occurring amino acid
  misc_feature (233)..(233): Xaa can be any naturally occurring amino acid
  misc_feature (235)..(236): Xaa can be any naturally occurring amino acid
  misc_feature (239)..(242): Xaa can be any naturally occurring amino acid
  misc_feature (245)..(246): Xaa can be any naturally occurring amino acid
  misc_feature (282)..(283): Xaa can be any naturally occurring amino acid
  misc_feature (312)..(313): Xaa can be any naturally occurring amino acid
  misc_feature (323)..(323): Xaa can be any naturally occurring amino acid
  misc_feature (335)..(335): Xaa can be any naturally occurring amino acid
  misc_feature (341)..(342): Xaa can be any naturally occurring amino acid
  misc_feature (345)..(345): Xaa can be any naturally occurring amino acid
  misc_feature (374)..(374): Xaa can be any naturally occurring amino acid
  misc_feature (409)..(413): Xaa can be any naturally occurring amino acid
  misc_feature (419)..(419): Xaa can be any naturally occurring amino acid
  misc_feature (434)..(434): Xaa can be any naturally occurring amino acid
AXXXXXXXXXXXXXXXXXXXXXXXXXXXXXXXXXXXXXXXXXXXXXXXXXXXXVRXMAVXXXXXXXXXXXXXXXXXSXYEIXTLTXWLLXQEXXXXGXIDAELTIVLSSISLACKQIASLVQRAXXXGISNLTGVQGAVNVQGEDQKKLDVVSNEVFSNCLRSSGRTGVIASEEEDVPVAVEESYSGXXXXXXXXXXNYIVVFDPLDGSSNIDAAVSTGSIFGIYXPNDECLXDXXDDXXXXTLXXVEQRCIVNVCQPGSNLLAAGYCMYSSSVIFVLTIGXXGVFGFTLDPMYGEFVLTQENIQIPKSGKXXIYSFNEGNYXLWDDKLKKYIDXLKDPGXXSGXKPYSARYIGSLVGDFHRTLLYGGIYGYPXDKKSKNGKLRLLYECAPMSFIVEQAGGKGSDGHQXXXXXRVLDIXPTEIHQRVPLYIGSXEEVEKLEKYLA

SEQ ID NO: 421 - DNA, 1679 bp, Artificial sequence
  Consensus sequence
  misc_feature (2)..(26): n is a, c, g, or t
  misc_feature (28)..(41): n is a, c, g, or t
  misc_feature (43)..(70): n is a, c, g, or t
  misc_feature (72)..(78): n is a, c, g, or t
  misc_feature (80)..(113): n is a, c, g, or t
  misc_feature (115)..(124): n is a, c, g, or t
  misc_feature (126)..(138): n is a, c, g, or t
  misc_feature (140)..(141): n is a, c, g, or t
  misc_feature (143)..(167): n is a, c, g, or t
  misc_feature (169)..(173): n is a, c, g, or t
  misc_feature (175)..(183): n is a, c, g, or t
  misc_feature (185)..(196): n is a, c, g, or t
  misc_feature (198)..(209): n is a, c, g, or t
  misc_feature (211)..(217): n is a, c, g, or t
  misc_feature (219)..(233): n is a, c, g, or t
  misc_feature (235)..(294): n is a, c, g, or t
  misc_feature (297)..(301): n is a, c, g, or t
  misc_feature (304)..(307): n is a, c, g, or t
  misc_feature (309)..(310): n is a, c, g, or t
  misc_feature (313)..(314): n is a, c, g, or t
  misc_feature (316)..(316): n is a, c, g, or t
  misc_feature (318)..(320): n is a, c, g, or t
  misc_feature (323)..(323): n is a, c, g, or t
  misc_feature (326)..(327): n is a, c, g, or t
  misc_feature (330)..(330): n is a, c, g, or t
  misc_feature (332)..(333): n is a, c, g, or t
  misc_feature (338)..(338): n is a, c, g, or t
  misc_feature (344)..(349): n is a, c, g, or t
  misc_feature (351)..(351): n is a, c, g, or t
  misc_feature (353)..(358): n is a, c, g, or t
  misc_feature (361)..(365): n is a, c, g, or t
  misc_feature (367)..(368): n is a, c, g, or t
  misc_feature (370)..(370): n is a, c, g, or t
  misc_feature (373)..(373): n is a, c, g, or t
  misc_feature (377)..(379): n is a, c, g, or t
  misc_feature (382)..(384): n is a, c, g, or t
  misc_feature (388)..(394): n is a, c, g, or t
  misc_feature (400)..(400): n is a, c, g, or t
  misc_feature (403)..(404): n is a, c, g, or t
  misc_feature (406)..(406): n is a, c, g, or t
  misc_feature (410)..(410): n is a, c, g, or t
  misc_feature (412)..(412): n is a, c, g, or t
  misc_feature (418)..(432): n is a, c, g, or t
  misc_feature (434)..(434): n is a, c, g, or t
  misc_feature (441)..(444): n is a, c, g, or t
  misc_feature (451)..(451): n is a, c, g, or t
  misc_feature (454)..(454): n is a, c, g, or t
  misc_feature (457)..(458): n is a, c, g, or t
  misc_feature (460)..(460): n is a, c, g, or t
  misc_feature (463)..(464): n is a, c, g, or t
  misc_feature (466)..(466): n is a, c, g, or t
  misc_feature (468)..(468): n is a, c, g, or t
  misc_feature (472)..(472): n is a, c, g, or t
  misc_feature (475)..(475): n is a, c, g, or t
  misc_feature (482)..(482): n is a, c, g, or t
  misc_feature (493)..(493): n is a, c, g, or t
  misc_feature (498)..(499): n is a, c, g, or t
  misc_feature (501)..(503): n is a, c, g, or t
  misc_feature (507)..(508): n is a, c, g, or t
  misc_feature (510)..(511): n is a, c, g, or t
  misc_feature (514)..(515): n is a, c, g, or t
  misc_feature (517)..(517): n is a, c, g, or t
  misc_feature (523)..(524): n is a, c, g, or t
  misc_feature (526)..(526): n is a, c, g, or t
  misc_feature (529)..(529): n is a, c, g, or t
  misc_feature (535)..(535): n is a, c, g, or t
  misc_feature (538)..(539): n is a, c, g, or t
  misc_feature (541)..(541): n is a, c, g, or t
  misc_feature (548)..(548): n is a, c, g, or t
  misc_feature (553)..(553): n is a, c, g, or t
  misc_feature (556)..(556): n is a, c, g, or t
  misc_feature (558)..(560): n is a, c, g, or t
  misc_feature (562)..(562): n is a, c, g, or t
  misc_feature (567)..(568): n is a, c, g, or t
  misc_feature (570)..(570): n is a, c, g, or t
  misc_feature (573)..(573): n is a, c, g, or t
  misc_feature (575)..(575): n is a, c, g, or t
  misc_feature (579)..(580): n is a, c, g, or t
  misc_feature (582)..(583): n is a, c, g, or t
  misc_feature (588)..(588): n is a, c, g, or t
  misc_feature (597)..(597): n is a, c, g, or t
  misc_feature (603)..(604): n is a, c, g, or t
  misc_feature (609)..(609): n is a, c, g, or t
  misc_feature (627)..(628): n is a, c, g, or t
  misc_feature (636)..(636): n is a, c, g, or t
  misc_feature (642)..(642): n is a, c, g, or t
  misc_feature (648)..(648): n is a, c, g, or t
  misc_feature (657)..(657): n is a, c, g, or t
  misc_feature (660)..(660): n is a, c, g, or t
  misc_feature (663)..(663): n is a, c, g, or t
  misc_feature (678)..(678): n is a, c, g, or t
  misc_feature (685)..(685): n is a, c, g, or t
  misc_feature (690)..(690): n is a, c, g, or t
  misc_feature (693)..(693): n is a, c, g, or t
  misc_feature (702)..(702): n is a, c, g, or t
  misc_feature (704)..(704): n is a, c, g, or t
  misc_feature (711)..(713): n is a, c, g, or t
  misc_feature (727)..(727): n is a, c, g, or t
  misc_feature (736)..(736): n is a, c, g, or t
  misc_feature (745)..(745): n is a, c, g, or t
  misc_feature (757)..(757): n is a, c, g, or t
  misc_feature (760)..(760): n is a, c, g, or t
  misc_feature (769)..(769): n is a, c, g, or t
  misc_feature (775)..(775): n is a, c, g, or t
  misc_feature (781)..(781): n is a, c, g, or t
  misc_feature (784)..(784): n is a, c, g, or t
  misc_feature (805)..(805): n is a, c, g, or t
  misc_feature (817)..(817): n is a, c, g, or t
  misc_feature (826)..(829): n is a, c, g, or t
  misc_feature (831)..(831): n is a, c, g, or t
  misc_feature (833)..(833): n is a, c, g, or t
  misc_feature (835)..(835): n is a, c, g, or t
  misc_feature (841)..(841): n is a, c, g, or t
  misc_feature (844)..(847): n is a, c, g, or t
  misc_feature (853)..(853): n is a, c, g, or t
  misc_feature (855)..(856): n is a, c, g, or t
  misc_feature (858)..(859): n is a, c, g, or t
  misc_feature (865)..(865): n is a, c, g, or t
  misc_feature (867)..(1011): n is a, c, g, or t
  misc_feature (1013)..(1013): n is a, c, g, or t
  misc_feature (1015)..(1016): n is a, c, g, or t
  misc_feature (1025)..(1025): n is a, c, g, or t
  misc_feature (1028)..(1030): n is a, c, g, or t
  misc_feature (1034)..(1034): n is a, c, g, or t
  misc_feature (1037)..(1038): n is a, c, g, or t
  misc_feature (1046)..(1046): n is a, c, g, or t
  misc_feature (1049)..(1050): n is a, c, g, or t
  misc_feature (1052)..(1052): n is a, c, g, or t
  misc_feature (1055)..(1055): n is a, c, g, or t
  misc_feature (1061)..(1061): n is a, c, g, or t
  misc_feature (1070)..(1070): n is a, c, g, or t
  misc_feature (1073)..(1073): n is a, c, g, or t
  misc_feature (1079)..(1079): n is a, c, g, or t
  misc_feature (1086)..(1086): n is a, c, g, or t
  misc_feature (1091)..(1092): n is a, c, g, or t
  misc_feature (1094)..(1094): n is a, c, g, or t
  misc_feature (1097)..(1097): n is a, c, g, or t
  misc_feature (1104)..(1104): n is a, c, g, or t
  misc_feature (1106)..(1106): n is a, c, g, or t
  misc_feature (1109)..(1109): n is a, c, g, or t
  misc_feature (1113)..(1113): n is a, c, g, or t
  misc_feature (1121)..(1121): n is a, c, g, or t
  misc_feature (1124)..(1124): n is a, c, g, or t
  misc_feature (1128)..(1133): n is a, c, g, or t
  misc_feature (1136)..(1138): n is a, c, g, or t
  misc_feature (1140)..(1140): n is a, c, g, or t
  misc_feature (1143)..(1143): n is a, c, g, or t
  misc_feature (1149)..(1150): n is a, c, g, or t
  misc_feature (1152)..(1152): n is a, c, g, or t
  misc_feature (1156)..(1156): n is a, c, g, or t
  misc_feature (1158)..(1158): n is a, c, g, or t
  misc_feature (1170)..(1170): n is a, c, g, or t
  misc_feature (1182)..(1183): n is a, c, g, or t
  misc_feature (1185)..(1185): n is a, c, g, or t
  misc_feature (1191)..(1191): n is a, c, g, or t
  misc_feature (1197)..(1198): n is a, c, g, or t
  misc_feature (1203)..(1203): n is a, c, g, or t
  misc_feature (1206)..(1206): n is a, c, g, or t
  misc_feature (1215)..(1216): n is a, c, g, or t
  misc_feature (1218)..(1218): n is a, c, g, or t
  misc_feature (1220)..(1222): n is a, c, g, or t
  misc_feature (1224)..(1224): n is a, c, g, or t
  misc_feature (1230)..(1230): n is a, c, g, or t
  misc_feature (1240)..(1240): n is a, c, g, or t
  misc_feature (1242)..(1242): n is a, c, g, or t
  misc_feature (1245)..(1245): n is a, c, g, or t
  misc_feature (1251)..(1252): n is a, c, g, or t
  misc_feature (1254)..(1254): n is a, c, g, or t
  misc_feature (1256)..(1256): n is a, c, g, or t
  misc_feature (1263)..(1263): n is a, c, g, or t
  misc_feature (1269)..(1270): n is a, c, g, or t
  misc_feature (1272)..(1272): n is a, c, g, or t
  misc_feature (1274)..(1275): n is a, c, g, or t
  misc_feature (1277)..(1277): n is a, c, g, or t
  misc_feature (1284)..(1284): n is a, c, g, or t
  misc_feature (1287)..(1287): n is a, c, g, or t
  misc_feature (1290)..(1290): n is a, c, g, or t
  misc_feature (1299)..(1299): n is a, c, g, or t
  misc_feature (1302)..(1302): n is a, c, g, or t
  misc_feature (1308)..(1308): n is a, c, g, or t
  misc_feature (1318)..(1318): n is a, c, g, or t
  misc_feature (1320)..(1320): n is a, c, g, or t
  misc_feature (1323)..(1323): n is a, c, g, or t
  misc_feature (1330)..(1332): n is a, c, g, or t
  misc_feature (1335)..(1337): n is a, c, g, or t
  misc_feature (1340)..(1341): n is a, c, g, or t
  misc_feature (1344)..(1344): n is a, c, g, or t
  misc_feature (1350)..(1350): n is a, c, g, or t
  misc_feature (1353)..(1353): n is a, c, g, or t
  misc_feature (1357)..(1359): n is a, c, g, or t
  misc_feature (1362)..(1362): n is a, c, g, or t
  misc_feature (1366)..(1366): n is a, c, g, or t
  misc_feature (1368)..(1368): n is a, c, g, or t
  misc_feature (1370)..(1370): n is a, c, g, or t
  misc_feature (1386)..(1387): n is a, c, g, or t
  misc_feature (1389)..(1390): n is a, c, g, or t
  misc_feature (1393)..(1393): n is a, c, g, or t
  misc_feature (1396)..(1396): n is a, c, g, or t
  misc_feature (1398)..(1401): n is a, c, g, or t
  misc_feature (1403)..(1403): n is a, c, g, or t
  misc_feature (1407)..(1409): n is a, c, g, or t
  misc_feature (1414)..(1414): n is a, c, g, or t
  misc_feature (1422)..(1422): n is a, c, g, or t
  misc_feature (1427)..(1427): n is a, c, g, or t
  misc_feature (1436)..(1436): n is a, c, g, or t
  misc_feature (1439)..(1440): n is a, c, g, or t
  misc_feature (1442)..(1442): n is a, c, g, or t
  misc_feature (1444)..(1445): n is a, c, g, or t
  misc_feature (1447)..(1451): n is a, c, g, or t
  misc_feature (1454)..(1458): n is a, c, g, or t
  misc_feature (1460)..(1460): n is a, c, g, or t
  misc_feature (1462)..(1462): n is a, c, g, or t
  misc_feature (1469)..(1469): n is a, c, g, or t
  misc_feature (1472)..(1472): n is a, c, g, or t
  misc_feature (1475)..(1475): n is a, c, g, or t
  misc_feature (1478)..(1478): n is a, c, g, or t
  misc_feature (1481)..(1481): n is a, c, g, or t
  misc_feature (1484)..(1484): n is a, c, g, or t
  misc_feature (1486)..(1488): n is a, c, g, or t
  misc_feature (1492)..(1500): n is a, c, g, or t
  misc_feature (1502)..(1502): n is a, c, g, or t
  misc_feature (1505)..(1505): n is a, c, g, or t
  misc_feature (1508)..(1511): n is a, c, g, or t
  misc_feature (1514)..(1514): n is a, c, g, or t
  misc_feature (1516)..(1517): n is a, c, g, or t
  misc_feature (1520)..(1521): n is a, c, g, or t
  misc_feature (1523)..(1524): n is a, c, g, or t
  misc_feature (1526)..(1527): n is a, c, g, or t
  misc_feature (1529)..(1530): n is a, c, g, or t
  misc_feature (1532)..(1533): n is a, c, g, or t
  misc_feature (1535)..(1535): n is a, c, g, or t
  misc_feature (1537)..(1538): n is a, c, g, or t
  misc_feature (1542)..(1548): n is a, c, g, or t
  misc_feature (1550)..(1550): n is a, c, g, or t
  misc_feature (1552)..(1552): n is a, c, g, or t
  misc_feature (1556)..(1566): n is a, c, g, or t
  misc_feature (1571)..(1572): n is a, c, g, or t
  misc_feature (1574)..(1580): n is a, c, g, or t
  misc_feature (1582)..(1582): n is a, c, g, or t
  misc_feature (1586)..(1592): n is a, c, g, or t
  misc_feature (1594)..(1595): n is a, c, g, or t
  misc_feature (1597)..(1599): n is a, c, g, or t
  misc_feature (1601)..(1602): n is a, c, g, or t
  misc_feature (1604)..(1605): n is a, c, g, or t
  misc_feature (1607)..(1614): n is a, c, g, or t
  misc_feature (1616)..(1616): n is a, c, g, or t
  misc_feature (1619)..(1619): n is a, c, g, or t
  misc_feature (1622)..(1623): n is a, c, g, or t
  misc_feature (1626)..(1626): n is a, c, g, or t
  misc_feature (1628)..(1628): n is a, c, g, or t
  misc_feature (1631)..(1631): n is a, c, g, or t
  misc_feature (1634)..(1634): n is a, c, g, or t
  misc_feature (1637)..(1637): n is a, c, g, or t
  misc_feature (1645)..(1645): n is a, c, g, or t
  misc_feature (1647)..(1650): n is a, c, g, or t
  misc_feature (1653)..(1663): n is a, c, g, or t
  misc_feature (1666)..(1667): n is a, c, g, or t
  misc_feature (1670)..(1673): n is a, c, g, or t
  misc_feature (1676)..(1678): n is a, c, g, or t
cnnnnnnnnnnnnnnnnnnnnnnnnngnnnnnnnnnnnnnngnnnnnnnnnnnnnnnnnnnnnnnnnnnngnnnnnnnannnnnnnnnnnnnnnnnnnnnnnnnnnnnnnnnncnnnnnnnnnncnnnnnnnnnnnnnanntnnnnnnnnnnnnnnnnnnnnnnnnnannnnntnnnnnnnnntnnnnnnnnnnnngnnnnnnnnnnnntnnnnnnntnnnnnnnnnnnnnnncnnnnnnnnnnnnnnnnnnnnnnnnnnnnnnnnnnnnnnnnnnnnnnnnnnnnnnnnnnnntgnnnnnctnnnnannttnncntnnngangannttncnnctgcntgccannnnnntntnnnnnngannnnngnntntcngaannnctnnnttcnnnnnnntacaangcnncntttngngatgannnnnnnnnnnnnnntncaaagannnntgaagcnacngtnncncgnntncncccntcnactcagngtttgaaggantttannannnaagnnannacnntngcatcnntncancatccnaanntntgtaaantgatnggntnnnangcaanngngangnttcnnannaaagnatgttggtntatgannggctntatcatggaagcttagannggctattntttggnagatcngatggtccntcnatngactggaatacacgnatgaaanttgcnctntgtgctgcncnaggtctnnnctttcttgcatgangaaggaccntttcaggcnatgtacaatganttntcaactgcnaacatncaaatnganaaagatttcagtgcaaagctntcaggatatggntgtgttggnnnnantncngaggangannnnatatcnannanntcagcngnnnnnnnnnnnnnnnnnnnnnnnnnnnnnnnnnnnnnnnnnnnnnnnnnnnnnnnnnnnnnnnnnnnnnnnnnnnnnnnnnnnnnnnnnnnnnnnnnnnnnnnnnnnnnnnnnnnnnnnnnnnnnnnnnnnnnnnnnnnnnnnnncngnngcaaacctntcnnngganacnntggagaanggnntnctnactccnaagagcaangtntggagntttgganttgtnntnctngagctantnacngganggaagaanctngatnnnnnnttnnncnaangaaganngnaatntngtcaagtggagnaggcctttcctnncngatganagtcgnntatcnctnatcatgganncncnnntnaaaggncgctttcctncnaangctgcnngnanagtagcngacatnntncnnanatgcctncanaangatccatcnganaggccnaccatgaggncngtngtggagnnnctnnnaanngtncagganatnaagnnnccntgcngntntcctctgcaagaaccnncnngcngcncnnnngnaaannnatgtnaaaatctncaagnctcaatggnatnntncnncnnnnnccnnnnntnancttctcnccntcnccnccntcncnnnaccnnnnnnnnntntcnccnnnnagntnntcnncnncnncnntnntncnnccannnnnnngntnttcnnnnnnnnnnntggannannnnnnngnaagnnnnnnnannannncnncnncnnnnnnnntncgnagnnctngngtnganggnttttgatngnnnntannnnnnnnnnnttnnttnnnnttnnnt

SEQ ID NO: 422 - protein, 562 aa, Artificial sequence
  Consensus sequence
  misc_feature (37)..(37): Xaa can be any naturally occurring amino acid
  misc_feature (64)..(66): Xaa can be any naturally occurring amino acid
  misc_feature (124)..(124): Xaa can be any naturally occurring amino acid
  misc_feature (143)..(147): Xaa can be any naturally occurring amino acid
  misc_feature (207)..(208): Xaa can be any naturally occurring amino acid
  misc_feature (476)..(476): Xaa can be any naturally occurring amino acid
  misc_feature (501)..(504): Xaa can be any naturally occurring amino acid
  misc_feature (522)..(524): Xaa can be any naturally occurring amino acid
MMGCFTVLRSKKKKPLALTKKSVDARESTSSRLPEPXEAHVPSLQSAPPSFRNKAKIHQSEKKXXXASYSRARVLSAPSSLIVVDQDGLPYAEFDDQDDSRGKGGSIKGHRFSNPLPLPLPSPXEGKSLRNFGSFKAINASGXXXXXPLDASGPLPLPPKKCDGLKNFSYEELSSACQWFSGDQCVSESLTSTSYKASFRDDFTDPXXKTIEAIVSRLLSSTQSLKEFKTQVNTLASLQHPNLCKLIGFHAREESNERMLVYERLHHGSLDKLLFGRSDGRFMDWSARLKVALGAARGLAFLHDEGPFQAMYNDFSTSNIQIDKDFTAKLSGYGCVGFNTEEEISNASVAAANLSVETLEKGVLTPKSNVWCFGVVLLELITGRKNLDVRSSKEERNIVKWSRPFLTDDSRLSLIMDSRIKGRFPTKAARIVADIILRCLNKDPSERPTMRAVVESLASVQDIKVPCRYPLQEPSXAAPRKVMLKSTSLNGIIHHHPVVTXXXXFSPSPPSRNQHLLSPRSXXXSTSALLPPRTSCALDDPRVSSIKKSPSPILRRSGVEGF

SEQ ID NO: 423 - protein, 61 aa, Artificial sequence
  Consensus sequence
  misc_feature (2)..(3): Xaa can be any naturally occurring amino acid
  misc_feature (5)..(7): Xaa can be any naturally occurring amino acid
  misc_feature (10)..(11): Xaa can be any naturally occurring amino acid
  misc_feature (14)..(15): Xaa can be any naturally occurring amino acid
  misc_feature (17)..(20): Xaa can be any naturally occurring amino acid
  misc_feature (23)..(34): Xaa can be any naturally occurring amino acid
  misc_feature (36)..(37): Xaa can be any naturally occurring amino acid
  misc_feature (40)..(41): Xaa can be any naturally occurring amino acid
  misc_feature (43)..(43): Xaa can be any naturally occurring amino acid
  misc_feature (45)..(47): Xaa can be any naturally occurring amino acid
  misc_feature (58)..(58): Xaa can be any naturally occurring amino acid
  misc_feature (60)..(60): Xaa can be any naturally occurring amino acid
KXXYXXXQLXXLEXXFXXXXYLXXXXXXXXXXXXKXXLAXXLXLXXXQKEIWFQNRRXRXK

SEQ ID NO: 424 - protein, 189 aa, Artificial sequence
  Consensus sequence
  misc_feature (28)..(35): Xaa can be any naturally occurring amino acid
  misc_feature (37)..(49): Xaa can be any naturally occurring amino acid
  misc_feature (52)..(52): Xaa can be any naturally occurring amino acid
  misc_feature (57)..(57): Xaa can be any naturally occurring amino acid
  misc_feature (60)..(64): Xaa can be any naturally occurring amino acid
  misc_feature (77)..(78): Xaa can be any naturally occurring amino acid
  misc_feature (98)..(98): Xaa can be any naturally occurring amino acid
  misc_feature (100)..(114): Xaa can be any naturally occurring amino acid
  misc_feature (116)..(129): Xaa can be any naturally occurring amino acid
  misc_feature (131)..(152): Xaa can be any naturally occurring amino acid
  misc_feature (186)..(188): Xaa can be any naturally occurring amino acid
MSRPGDWNCRSCQHLNFQRRDSCQRCGXXXXXXXXGXXXXXXXXXXXXXGGXGGSSXGFXXXXXTGSDVRPGDWYCXXGNCGAHNFASRSSCFKCGAXKXXXXXXXXXXXXXXXGXXXXXXXXXXXXXXGXXXXXXXXXXXXXXXXXXXXXXWKSGDWICTRSGCNEHNFASRMECFRCNAPRDSXXXT
